(19) United States
(12) Patent Application Publication
(10) Pub. No.: US 2024/0132886 A1
(43) Pub. Date: Apr. 25, 2024

(54) COMPLEMENT COMPONENT 9 (C9) iRNA COMPOSITIONS AND METHODS OF USE THEREOF

(71) Applicant: Alnylam Pharmaceuticals, Inc., Cambridge, MA (US)

(72) Inventors: Elane Fishilevich, Rochester, MA (US); Anna Borodovsky, Melrose, MA (US); Jeffrey Zuber, Somerville, MA (US)

(21) Appl. No.: 18/215,849

(22) Filed: Jun. 29, 2023

Related U.S. Application Data
(63) Continuation of application No. PCT/US2022/011009, filed on Jan. 3, 2022.
(60) Provisional application No. 63/280,662, filed on Nov. 18, 2021.
(60) Provisional application No. 63/133,816, filed on Jan. 5, 2021.

(51) Int. Cl. C12N 15/113; A61K 45/06; A61P 37/02

(52) U.S. Cl. CPC C12N 15/113; A61K 45/06; A61P 37/02; C12N 2310/11; C12N 2310/3125; C12N 2310/315

(57) ABSTRACT

The invention relates to iRNA, e.g., double-stranded ribonucleic acid (dsRNA), compositions targeting the complement component 9 (C9) gene. The invention also relates to methods of using such RNAi agents to inhibit expression of a C9 gene and to methods of preventing and treating a C9-associated disorder, e.g., paroxysmal nocturnal hemoglobinuria and atypical hemolytic uremic syndrome.

### RELATED APPLICATIONS

[0001] This application is a 35 § U.S.C. 111(a) continuation application which claims the benefit of priority to PCT/US2022/011009, filed on Jan. 3, 2022, which, in turn, claims the benefit of priority to U.S. Provisional Application No. 63/133,816, filed on Jan. 5, 2021, and U.S. Provisional Application No. 63/280,662, filed on Nov. 18, 2021. The entire contents of each of the foregoing applications are incorporated herein by reference.

### SEQUENCE LISTING

[0002] The application contains a Sequence Listing which has been submitted electronically in .XML format and is hereby incorporated by reference in its entirety. Said .XML copy, created on Nov. 13, 2023, is named “121301_14203_SL.xml” and is 4,565,542 bytes in size. The sequence listing contained in this .XML file is part of the specification and is hereby incorporated by reference herein in its entirety.

### BACKGROUND OF THE INVENTION

[0003] The complement system works as the major part of the innate immune system, defending the foreign pathogens and modified self-tissues. Complement was first discovered in the 1890s when it was found to aid or “complement” the killing of bacteria by heat-stable antibodies present in normal serum (Walport, M. J. (2001) N Engl J Med. 344:1058). The complement system consists of more than 30 proteins that are either present as soluble proteins in the blood or are present as membrane-associated proteins. Activation of complement leads to a sequential cascade of enzymatic reactions, known as complement activation pathways resulting in the formation of the potent anaphylatoxins C3a and C5a that elicit a plethora of physiological responses that range from chemoattraction to apoptosis. Initially, complement was thought to play a major role in innate immunity where a robust and rapid response is mounted against invading pathogens. However, recently it is becoming increasingly evident that complement also plays an important role in adaptive immunity involving T and B cells that help in elimination of pathogens (Dunkelberger J R and Song W C. (2010) Cell Res. 20:34; Molina H, et al. (1996) Proc Natl Acad Sci USA. 93:3357), in maintaining immunologic memory preventing pathogenic re-invasion, and is involved in numerous human pathological states (Qu, H, et al. (2009) Mol Immunol. 47:185; Wagner, E. and Frank M M. (2010) Nat Rev Drug Discov. 9:43).

[0004] Complement activation is known to occur through three different pathways: classical pathway, lectin pathway and alternative pathway. The classical pathway is often activated by antibody-antigen complexes or by the C-reactive protein (CRP), both of which interact with complement component Clq. In addition, the classical pathway can be activated by phosphatidyl serine present in apoptotic bodies in the absence of immune complexes. The lectin pathway is initiated by the mannose-binding lectins (MBL) that bind to complex carbohydrate residues on the surface of pathogens. The activation of the classical pathway or the lectin pathway leads to activation of the (C4b2b) C3 convertase.

[0005] The alternate pathway is activated by the binding of C3b, which is spontaneously generated by the hydrolysis of C3, on targeted surfaces. This surface-bound C3b is then recognized by factor B, forming the complex C3bB. The C3bB complex, in turn, is cleaved by factor D to yield the active form of the C3 convertase of the alternative pathway (C3bBb). Both types of C3 convertases will cleave C3, forming C3b. C3b then either binds to more factor B, enhancing the complement activation through the alternative pathway (the so-called alternative or amplification loop), or leads to the formation of the active C5 convertase (C3bBbC3b or C4bC2bC3b), which cleaves C5 and triggers the late events that result in the formation of the membrane attack complex (MAC) (C5b-9).

[0006] The MAC forms transmembrane channels on the surface of pathogenic bacteria, causing cell lysis and death. Assembly of the MAC is initiated when the C5 convertase cleaves C5 into C5a and C5b. Complement protein C6 then binds to C5b, and this complex binds to complement C7 forming a larger complex. This complex undergoes a conformation change that exposes a hydrophobic site on C7 and draws the complex into the hydrophobic lipid bilayer portion of the pathogen's plasma membrane. Subsequent binding of the C5b-C6-C7 complex to C8 exposes another hydrophobic site that further anchors the 5b-8 complex into the pathogen's lipid bilayer. Complement C8 is composed of two proteins, C8β and C8αγ. C8αγ has a hydrophobic site that draws it into the growing complex housed in the pathogen lipid bilayer and also initiates polymerization of 10-16 molecules of complement C9. This completes the transmembrane pore known as the MAC. The MAC has a hydrophobic external face that is stabilized by interaction with the membrane bilayer interior and a hydrophilic internal face that allows rapid passage of water and solutes.

[0007] MAC synthesis is inhibited by CD59 (also known as MAC-inhibitory protein, or protectin) found on the surface of normal human cells. Its function is to protect normal human cells from being accidentally destroyed by their own antibacterial MAC. CD59 prevents polymerization of C9 by the complex C5b-C6-C7-C8, thus preventing synthesis of MAC on normal cells. In patients with paroxysmal nocturnal hemoglobinuria, erythrocytes lack CD59 and so can be lysed by MAC.

[0008] Inappropriate activation of the complement system is responsible for propagating and/or initiating pathology in many different diseases, including, for example, paroxysmal nocturnal hemoglobinuria, atypical hemolytic uremic syndrome, myasthenia gravis (MG), rheumatoid arthritis, ischemia-reperfusion injuries and neurodegenerative diseases.

[0009] To date, only one therapeutic that targets the C5-C5a axis is available for the treatment of complement component-associated diseases, the anti-C5 antibody, eculizumab (Soliris®). Although eculizumab has been shown to be effective for the treatment of paroxysmal nocturnal hemoglobinuria (PNH) and atypical hemolytic uremic syndrome (aHUS) and is currently being evaluated in clinical trials for additional complement component-associated diseases, eculizumab therapy requires weekly high dose infusions followed by biweekly maintenance infusions at a high cost. Accordingly, there is a need in the art for alternative therapies and combination therapies for subjects having a complement component, e.g., C9, associated disease.

### SUMMARY OF THE INVENTION

[0010] The present invention provides iRNA compositions which affect the RNA-induced silencing complex (RISC)-mediated cleavage of RNA transcripts of a gene encoding complement component 9 (C9). The complement component 9 (C9) may be within a cell, e.g., a cell within a subject, such as a human subject.

[0011] In an aspect, the invention provides a double stranded ribonucleic acid (dsRNA) agent for inhibiting expression of complement component 9 (C9) in a cell, wherein the dsRNA agent comprises a sense strand and an antisense strand forming a double stranded region, wherein the sense strand comprises at least 15, e.g., 15, 16, 17, 18, 19, 20, 21, 22, or 23, contiguous nucleotides differing by no more than 0, 1, 2, or 3 nucleotides from the nucleotide sequence of SEQ ID NO:1 and the antisense strand comprises at least 15, e.g., 15, 16, 17, 18, 19, 20, 21, 22, or 23, contiguous nucleotides differing by no more than 1, 2, or 3 nucleotides from the nucleotide sequence of SEQ ID NO:2.

[0012] In another aspect, the present invention provides a double stranded ribonucleic acid (dsRNA) for inhibiting expression of C9 in a cell, wherein said dsRNA comprises a sense strand and an antisense strand forming a double stranded region, wherein the antisense strand comprises a region of complementarity to an mRNA encoding C9, and wherein the region of complementarity comprises at least 15 contiguous nucleotides differing by no more than 0, 1, 2, or 3 nucleotides from any one of the antisense nucleotide sequences in any one of Tables 2 and 3.

[0013] In one embodiment, the dsRNA agent comprises a sense strand comprising a contiguous nucleotide sequence which has at least 85%, e.g., 85%, 90%, 91%, 92%, 93%, 94%, 95%, 96%, 97%, 98%, 99%, or 100%, nucleotide sequence identity over its entire length to any one of the nucleotide sequences of the sense strands in any one of Tables 2-3 and an antisense strand comprising a contiguous nucleotide sequence which has at least 85%, e.g., 85%, 90%, 91%, 92%, 93%, 94%, 95%, 96%, 97%, 98%, 99%, or 100%, nucleotide sequence identity over its entire length to any one of the nucleotide sequences of the antisense strands in any one of Tables 2-3.

[0014] In one embodiment, the dsRNA agent comprises a sense strand comprising at least 15, e.g., 15, 16, 17, 18, 19, 20, 21, 22, or 23, contiguous nucleotides differing by no more than three nucleotides from any one of the nucleotide sequences of the sense strands in any one of Tables 2-3 and an antisense strand comprising at least 15, e.g., 15, 16, 17, 18, 19, 20, 21, 22, or 23 contiguous nucleotides differing by no more than three nucleotides from any one of the nucleotide sequences of the antisense strands in any one of Tables 2-3.

[0015] In one embodiment, the dsRNA agent comprises a sense strand comprising at least 15, e.g., 15, 16, 17, 18, 19, 20, 21, 22, or 23, contiguous nucleotides differing by no more than two nucleotides from any one of the nucleotide sequences of the sense strands in any one of Tables 2-3 and an antisense strand comprising at least 15, e.g., 15, 16, 17, 18, 19, 20, 21, or 23 contiguous nucleotides differing by no more than two nucleotides from any one of the nucleotide sequences of the antisense strands in any one of Tables 2-3.

[0016] In one embodiment, the dsRNA agent comprises a sense strand comprising at least 15, e.g., 15, 16, 17, 18, 19, 20, 21, 22, or 23, contiguous nucleotides differing by no more than one nucleotide from any one of the nucleotide sequences of the sense strands in any one of Tables 2-3 and an antisense strand comprising at least 15, e.g., 15, 16, 17, 18, 19, 20, 21, 22, or 23, contiguous nucleotides differing by no more than one nucleotide from any one of the nucleotide sequences of the antisense strands in any one of Tables 2-3.

[0017] In one embodiment, the dsRNA agent comprises a sense strand comprising or consisting of a nucleotide sequence selected from the group consisting of any one of the nucleotide sequences of the sense strands in any one of Tables 2-3 and an antisense strand comprising or consisting of a nucleotide sequence selected from the group consisting of any one of the nucleotide sequences of the antisense strands in any one of Tables 2-3.

[0018] In one embodiment, the dsRNA agent comprises at least one modified nucleotide.

[0019] In one embodiment, substantially all of the nucleotides of the sense strand; substantially all of the nucleotides of the antisense strand comprise a modification; or substantially all of the nucleotides of the sense strand and substantially all of the nucleotides of the antisense strand comprise a modification.

[0020] In one embodiment, all of the nucleotides of the sense strand comprise a modification; all of the nucleotides of the antisense strand comprise a modification; or all of the nucleotides of the sense strand and all of the nucleotides of the antisense strand comprise a modification.

[0021] In one embodiment, at least one of the modified nucleotides is selected from the group consisting of a deoxy-nucleotide, a 3′-terminal deoxy-thymine (dT) nucleotide, a 2′-O-methyl modified nucleotide, a 2′-fluoro modified nucleotide, a 2′-deoxy-modified nucleotide, a locked nucleotide, an unlocked nucleotide, a conformationally restricted nucleotide, a constrained ethyl nucleotide, an abasic nucleotide, a 2′-amino-modified nucleotide, a 2′-O-allyl-modified nucleotide, 2′-C-alkyl-modified nucleotide, 2′-hydroxly-modified nucleotide, a 2′-methoxyethyl modified nucleotide, a 2′-O-alkyl-modified nucleotide, a morpholino nucleotide, a phosphoramidate, a non-natural base comprising nucleotide, a tetrahydropyran modified nucleotide, a 1,5-anhydrohexitol modified nucleotide, a cyclohexenyl modified nucleotide, a nucleotide comprising a phosphorothioate group, a nucleotide comprising a methylphosphonate group, a nucleotide comprising a 5′-phosphate, a nucleotide comprising a 5′-phosphate mimic, a thermally destabilizing nucleotide, a glycol modified nucleotide (GNA), and a 2-O—(N-methylacetamide) modified nucleotide; and combinations thereof.

[0022] In one embodiment, the modifications on the nucleotides are selected from the group consisting of LNA, HNA, CeNA, 2′-methoxyethyl, 2′-O-alkyl, 2′-O-allyl, 2′-C-allyl, 2′-fluoro, 2′-deoxy, 2′-hydroxyl, and glycol; and combinations thereof.

[0023] In one embodiment, at least one of the modified nucleotides is selected from the group consisting of a deoxy-nucleotide, a 2′-O-methyl modified nucleotide, a 2′-fluoro modified nucleotide, a 2′-deoxy-modified nucleotide, a glycol modified nucleotide (GNA), e.g., Ggn, Cgn, Tgn, or Agn, and, a vinyl-phosphonate nucleotide; and combinations thereof.

[0024] In another embodiment, at least one of the modifications on the nucleotides is a thermally destabilizing nucleotide modification.

[0025] In one embodiment, the thermally destabilizing nucleotide modification is selected from the group consisting of an abasic modification; a mismatch with the opposing nucleotide in the duplex; and destabilizing sugar modification, a 2′-deoxy modification, an acyclic nucleotide, an unlocked nucleic acids (UNA), and a glycerol nucleic acid (GNA).

[0026] The double stranded region may be 19-30 nucleotide pairs in length; 19-25 nucleotide pairs in length; 19-23 nucleotide pairs in length; 23-27 nucleotide pairs in length; or 21-23 nucleotide pairs in length.

[0027] In one embodiment, each strand is independently no more than 30 nucleotides in length.

[0028] In one embodiment, the sense strand is 21 nucleotides in length and the antisense strand is 23 nucleotides in length.

[0029] The region of complementarity may be at least 17 nucleotides in length; between 19 and 23 nucleotides in length; or 19 nucleotides in length.

[0030] In one embodiment, at least one strand comprises a 3′ overhang of at least 1 nucleotide. In another embodiment, at least one strand comprises a 3′ overhang of at least 2 nucleotides.

[0031] In one embodiment, the dsRNA agent further comprises a ligand.

[0032] In one embodiment, the ligand is conjugated to the 3′ end of the sense strand of the dsRNA agent.

[0033] In one embodiment, the ligand is an N-acetylgalactosamine (GalNAc) derivative.

[0034] In one embodiment, the ligand is one or more GalNAc derivatives attached through a monovalent, bivalent, or trivalent branched linker.

[0035] In one embodiment, the ligand is

[chemical structure]

[0036] In one embodiment, the dsRNA agent is conjugated to the ligand as shown in the following schematic

[chemical structure]

and, wherein X is O or S.

[0037] In one embodiment, the X is O.

[0038] In one embodiment, the dsRNA agent further comprises at least one phosphorothioate or methylphosphonate internucleotide linkage.

[0039] In one embodiment, the phosphorothioate or methylphosphonate internucleotide linkage is at the 3′-terminus of one strand, e.g., the antisense strand or the sense strand.

[0040] In another embodiment, the phosphorothioate or methylphosphonate internucleotide linkage is at the 5′-terminus of one strand, e.g., the antisense strand or the sense strand.

[0041] In one embodiment, the phosphorothioate or methylphosphonate internucleotide linkage is at the both the 5′- and 3′-terminus of one strand. In one embodiment, the strand is the antisense strand.

[0042] In one embodiment, the sense strand comprises two phosphorothioate or methylphosphonate internucleotide linkages at the 5′-terminus.

[0043] In one embodiment, the antisense strand comprises two phosphorothioate or methylphosphonate internucleotide linkages at the 5′-terminus.

[0044] In another embodiment, the antisense strand comprises two phosphorothioate or methylphosphonate internucleotide linkages at both the 5′- and 3′-terminus.

[0045] In one embodiment, the sense strand comprises two phosphorothioate or methylphosphonate internucleotide linkages at the 5′-terminus and the antisense strand comprises two phosphorothioate or methylphosphonate internucleotide linkages at both the 5′- and 3′-terminus.

[0046] In one embodiment, the base pair at the 1 position of the 5′-end of the antisense strand of the duplex is an AU base pair.

[0047] The present invention also provides cells containing any of the dsRNA agents of the invention and pharmaceutical compositions comprising any of the dsRNA agents of the invention.

[0048] The pharmaceutical composition of the invention may include dsRNA agent in an unbuffered solution, e.g., saline or water, or the pharmaceutical composition of the invention may include the dsRNA agent is in a buffer solution, e.g., a buffer solution comprising acetate, citrate, prolamine, carbonate, or phosphate or any combination thereof; or phosphate buffered saline (PBS).

[0049] In one aspect, the present invention provides a method of inhibiting expression of a complement component 9 (C9) gene in a cell. The method includes contacting the cell with any of the dsRNAs of the invention or any of the pharmaceutical compositions of the invention, thereby inhibiting expression of the C9 gene in the cell.

[0050] In one embodiment, the cell is within a subject, e.g., a human subject, e.g., a subject having a complement component 9 (C9)-associated disorder (e.g., a complement disorder involving membrane attack complex (MAC) formation), such as a C9-associated disorder selected from the group consisting of paroxysmal nocturnal hemoglobinuria (PNH), atypical hemolytic uremic syndrome (aHUS), myasthenia gravis (MG), macular degeneration (e.g., age-related macular degeneration), asthma, rheumatoid arthritis, systemic lupus erythmatosis, glomerulonephritis, psoriasis, dermatomyositis bullous pemphigoid, Shiga toxin E. coli-related hemolytic uremic syndrome, neuromyelistis optica, dense deposit disease, C3 neuropathy, cold agglutinin disease, anti-neutrophil cytoplasmic antibody-associated vasculitis, humoral and vascular transplant rejection, graft dysfunction, myocardial infarction, a sensitized recipient of a transplant, and sepsis.

[0051] In one embodiment, the C9-associated disorder is paroxysmal nocturnal hemoglobinuria (PNH).

[0052] In another embodiment, the C9-associated disorder is atypical hemolytic uremic syndrome (aHUS).

[0053] In another embodiment, the C9-associated disorder is myasthenia gravis (MG).

[0054] In one embodiment, contacting the cell with the dsRNA agent inhibits the expression of C9 by at least 50%, 60%, 70%, 80%, 90%, or 95%.

[0055] In one embodiment, inhibiting expression of C9 decreases C9 protein level in serum of the subject by at least 50%, 60%, 70%, 80%, 90%, or 95%.

[0056] In one aspect, the present invention provides a method of treating a subject having a disorder that would benefit from reduction in complement component 9 (C9) expression (e.g., a complement disorder involving membrane attack complex (MAC) formation). The method includes administering to the subject a therapeutically effective amount of any of the dsRNAs of the invention or any of the pharmaceutical compositions of the invention, thereby treating the subject having the disorder that would benefit from reduction in C9 expression.

[0057] In another aspect, the present invention provides a method of preventing at least one symptom in a subject having a disorder that would benefit from reduction in complement component 9 (C9) expression. The method includes administering to the subject a prophylactically effective amount of any of the dsRNAs of the invention or any of the pharmaceutical compositions of the invention, thereby preventing at least one symptom in the subject having the disorder that would benefit from reduction in C9 expression.

[0058] In one embodiment, the disorder is a C9-associated disorder (e.g., a complement disorder involving membrane attack complex (MAC) formation), e.g., a C9-associated disorder selected from the group consisting of paroxysmal nocturnal hemoglobinuria (PNH), atypical hemolytic uremic syndrome (aHUS), myasthenia gravis (MG), macular degeneration (e.g., age-related macular degeneration), asthma, rheumatoid arthritis, systemic lupus erythmatosis, glomerulonephritis, psoriasis, dermatomyositis bullous pemphigoid, Shiga toxin E. coli-related hemolytic uremic syndrome, neuromyelistis optica, dense deposit disease, C3 neuropathy, cold agglutinin disease, anti-neutrophil cytoplasmic antibody-associated vasculitis, humoral and vascular transplant rejection, graft dysfunction, myocardial infarction, a sensitized recipient of a transplant, and sepsis.

[0059] In one embodiment, the C9-associated disorder is paroxysmal nocturnal hemoglobinuria (PNH).

[0060] In another embodiment, the C9-associated disorder is atypical hemolytic uremic syndrome (aHUS).

[0061] In another embodiment, the C9-associated disorder is myasthenia gravis (MG).

[0062] In one embodiment, the subject is human.

[0063] In one embodiment, the dsRNA agent is administered to the subject at a dose of about 0.01 mg/kg to about 50 mg/kg.

[0064] In one embodiment, the dsRNA agent is administered to the subject subcutaneously.

[0065] In another embodiment, the dsRNA agent is administered to the subject intravenously.

[0066] In one embodiment, the administration of the agent to the subject causes a decrease in hemolysis and/or a decrease in C9 protein accumulation.

[0067] In one embodiment, the methods of the invention further comprise determining the level of C9 in a sample(s) from the subject.

[0068] In one embodiment, the methods further comprise administering to the subject an additional therapeutic agent. In one embodiment, the additional therapeutic agent is eculimumab. In another embodiment, the additional therapeutic agent is compstatin.

[0069] In one embodiment, the methods further comprise measuring lactate dehydrogenase (LDH) levels in the subject.

[0070] The present invention also provides kits comprising any of the dsRNAs of the invention or any of the pharmaceutical compositions of the invention, and optionally, instructions for use.

[0071] The present invention also provide an RNA-induced silencing complex (RISC) comprising an antisense strand of any of the dsRNA agents of the present invention.

### BRIEF DESCRIPTION OF THE DRAWINGS

[0072] FIG. 1 is a schematic of the three complement pathways: alternative, classical and lectin.

### DETAILED DESCRIPTION OF THE INVENTION

[0073] The present invention provides iRNA compositions which effect the RNA-induced silencing complex (RISC)-mediated cleavage of RNA transcripts of a complement component 9 (C9) gene. The gene may be within a cell, e.g., a cell within a subject, such as a human. The use of these iRNAs enables the targeted degradation of mRNAs of the corresponding gene (C9 gene) in mammals.

[0074] The iRNAs of the invention have been designed to target the human complement component 9 (C9) gene, including portions of the gene that are conserved in the C9 orthologs of other mammalian species. Without intending to be limited by theory, it is believed that a combination or sub-combination of the foregoing properties and the specific target sites or the specific modifications in these iRNAs confer to the iRNAs of the invention improved efficacy, stability, potency, durability, and safety.

[0075] Accordingly, the present invention provides methods for treating and preventing a complement component 9 (C9)-associated disorder, e.g., paroxysmal nocturnal hemoglobinuria (PNH), atypical hemolytic uremic syndrome (aHUS), or myasthenia gravis (MG), using iRNA compositions which effect the RNA-induced silencing complex (RISC)-mediated cleavage of RNA transcripts of a C9 gene.

[0076] The iRNAs of the invention include an RNA strand (the antisense strand) having a region which is up to about 30 nucleotides or less in length, e.g., 19-30, 19-29, 19-28, 19-27, 19-26, 19-25, 19-24, 19-23, 19-22, 19-21, 19-20, 20-30, 20-29, 20-28, 20-27, 20-26, 20-25, 20-24,20-23, 20-22, 20-21, 21-30, 21-29, 21-28, 21-27, 21-26, 21-25, 21-24, 21-23, or 21-22 nucleotides in length, which region is substantially complementary to at least part of an mRNA transcript of a C9 gene.

[0077] In certain embodiments, one or both of the strands of the double stranded RNAi agents of the invention is up to 66 nucleotides in length, e.g., 36-66, 26-36, 25-36, 31-60, 22-43, 27-53 nucleotides in length, with a region of at least 19 contiguous nucleotides that is substantially complementary to at least a part of an mRNA transcript of a C9 gene. In some embodiments, such iRNA agents having longer length antisense strands preferably may include a second RNA strand (the sense strand) of 20-60 nucleotides in length wherein the sense and antisense strands form a duplex of 18-30 contiguous nucleotides.

[0078] The use of iRNAs of the invention enables the targeted degradation of mRNAs of the corresponding gene (C9 gene) in mammals. Using in vitro assays, the present inventors have demonstrated that iRNAs targeting a C9 gene can potently mediate RNAi, resulting in significant inhibition of expression of a C9 gene. Thus, methods and compositions including these iRNAs are useful for treating a subject having a C9-associated disorder, e.g., paroxysmal nocturnal hemoglobinuria (PNH), atypical hemolytic uremic syndrome (aHUS), or myasthenia gravis (MG).

[0079] Accordingly, the present invention provides methods and combination therapies for treating a subject having a disorder that would benefit from inhibiting or reducing the expression of a complement component 9 (C9) gene, e.g., a C9-associated disease, such as paroxysmal nocturnal hemoglobinuria (PNH), atypical hemolytic uremic syndrome (aHUS), or myasthenia gravis (MG), using iRNA compositions which effect the RNA-induced silencing complex (RISC)-mediated cleavage of RNA transcripts of a C9 gene.

[0080] The present invention also provides methods for preventing at least one symptom in a subject having a disorder that would benefit from inhibiting or reducing the expression of a complement component 9 (C9) gene, e.g., paroxysmal nocturnal hemoglobinuria (PNH), atypical hemolytic uremic syndrome (aHUS), or myasthenia gravis (MG). For example, in a subject having paroxysmal nocturnal hemoglobinuria, the methods of the present invention may reduce at least one symptom in the subject, e.g., hemolysis.

[0081] The following detailed description discloses how to make and use compositions containing iRNAs to inhibit the expression of a C9 gene as well as compositions, uses, and methods for treating subjects that would benefit from inhibition and/or reduction of the expression of a C9 gene, e.g., subjects susceptible to or diagnosed with a C9-associated disorder.

### I. Definitions

[0082] In order that the present invention may be more readily understood, certain terms are first defined. In addition, it should be noted that whenever a value or range of values of a parameter are recited, it is intended that values and ranges intermediate to the recited values are also intended to be part of this invention.

[0083] The articles “a” and “an” are used herein to refer to one or to more than one (i.e., to at least one) of the grammatical object of the article. By way of example, “an element” means one element or more than one element, e.g., a plurality of elements.

[0084] The term “including” is used herein to mean, and is used interchangeably with, the phrase “including but not limited to”.

[0085] The term “or” is used herein to mean, and is used interchangeably with, the term “and/or,” unless context clearly indicates otherwise. For example, “sense strand or antisense strand” is understood as “sense strand or antisense strand or sense strand and antisense strand.” The term “about” is used herein to mean within the typical ranges of tolerances in the art. For example, “about” can be understood as about 2 standard deviations from the mean. In certain embodiments, about means±10%. In certain embodiments, about means±5%. When about is present before a series of numbers or a range, it is understood that “about” can modify each of the numbers in the series or range.

[0086] The term “at least” prior to a number or series of numbers is understood to include the number adjacent to the term “at least”, and all subsequent numbers or integers that could logically be included, as clear from context. For example, the number of nucleotides in a nucleic acid molecule must be an integer. For example, “at least 19 nucleotides of a 21 nucleotide nucleic acid molecule” means that 19, 20, or 21 nucleotides have the indicated property. When at least is present before a series of numbers or a range, it is understood that “at least” can modify each of the numbers in the series or range.

[0087] As used herein, “no more than” or “less than” is understood as the value adjacent to the phrase and logical lower values or integers, as logical from context, to zero. For example, a duplex with an overhang of “no more than 2 nucleotides” has a 2, 1, or 0 nucleotide overhang. When “no more than” is present before a series of numbers or a range, it is understood that “no more than” can modify each of the numbers in the series or range. As used herein, ranges include both the upper and lower limit.

[0088] As used herein, methods of detection can include determination that the amount of analyte present is below the level of detection of the method.

[0089] In the event of a conflict between an indicated target site and the nucleotide sequence for a sense or antisense strand, the indicated sequence takes precedence.

[0090] In the event of a conflict between a sequence and its indicated site on a transcript or other sequence, the nucleotide sequence recited in the specification takes precedence.

[0091] As used herein, the term “C9” refers to the well-known gene that encodes complement component 9 or complement component C9, as well as to its protein product, also known in the art as complement C9, ARMD15 or C9D. This gene encodes the final component of the complement system. It participates in the formation of the Membrane Attack Complex (MAC). The MAC assembles on bacterial membranes to form a pore, permitting disruption of bacterial membrane organization.

[0092] The term “C9” includes human C9, the amino acid and complete coding sequence of which may be found in for example, GenBank Accession No. GI: 1519312284 (NM 001737.5; SEQ ID NO:1); mouse (Mus musculus) C9, the amino acid and complete coding sequence of which may be found in for example, GenBank Accession No. GI: 1572616278 (NM_001368421.1, SEQ ID NO:3); rat (Rattus norvegicus) C9, the amino acid and complete coding sequence of which may be found in for example, GenBank Accession No. GI: 1937369530 (NM_057146.2, SEQ ID NO: 5); and Macaca fascicularis C9, the amino acid and complete coding sequence of which may be found in for example, GenBank Accession No. GI: 982252559 (XM_005556778.2, SEQ ID NO:7).

[0093] Further information on C9 can be found, for example, at www.ncbi.nlm.nih.gov/gene/735.

[0094] Additional examples of C9 mRNA sequences are readily available through publicly available databases, e.g., GenBank, UniProt, OMIM, and the Macaca genome project web site.

[0095] The term “C9,” as used herein, also refers to naturally occurring DNA sequence variations of the C9 gene, such as a single nucleotide polymorphism (SNP) in the C9 gene. Exemplary SNPs in the C9 DNA sequence may be found through the dbSNP database available at www.ncbi.nlm.nih.gov/projects/SNP/.

[0096] Exemplary C9 nucleotide sequences may also be found in SEQ ID NOs:1-8. SEQ ID NOs:2, 4, 6 and 8 are the reverse complement sequences of SEQ ID NOs:1, 3, 5 and 7, respectively.

[0097] The entire contents of each of the foregoing GenBank Accession numbers and the Gene database numbers are incorporated herein by reference as of the date of filing this application.

[0098] As used herein, “target sequence” refers to a contiguous portion of the nucleotide sequence of an mRNA molecule formed during the transcription of a C9 gene, including mRNA that is a product of RNA processing of a primary transcription product. The target portion of the sequence will be at least long enough to serve as a substrate for iRNA-directed cleavage at or near that portion of the nucleotide sequence of an mRNA molecule formed during the transcription of a C9 gene. In one embodiment, the target sequence is within the protein coding region of C9.

[0099] The target sequence may be from about 19-36 nucleotides in length, e.g., preferably about 19-30 nucleotides in length. For example, the target sequence can be about 19-30 nucleotides, 19-30, 19-29, 19-28, 19-27, 19-26, 19-25, 19-24, 19-23, 19-22, 19-21, 19-20, 20-30, 20-29, 20-28, 20-27, 20-26, 20-25, 20-24, 20-23, 20-22, 20-21, 21-30, 21-29, 21-28, 21-27, 21-26, 21-25, 21-24, 21-23, or 21-22 nucleotides in length. In certain embodiments, the target sequence is 19-23 nucleotides in length, optionally 21-23 nucleotides in length. Ranges and lengths intermediate to the above recited ranges and lengths are also contemplated to be part of the disclosure.

[0100] As used herein, the term “strand comprising a sequence” refers to an oligonucleotide comprising a chain of nucleotides that is described by the sequence referred to using the standard nucleotide nomenclature.

[0101] “G,” “C,” “A,” “T,” and “U” each generally stand for a nucleotide that contains guanine, cytosine, adenine, thymidine, and uracil as a base, respectively. However, it will be understood that the term “ribonucleotide” or “nucleotide” can also refer to a modified nucleotide, as further detailed below, or a surrogate replacement moiety (see, e.g., Table 1). The skilled person is well aware that guanine, cytosine, adenine, and uracil can be replaced by other moieties without substantially altering the base pairing properties of an oligonucleotide comprising a nucleotide bearing such replacement moiety. For example, without limitation, a nucleotide comprising inosine as its base can base pair with nucleotides containing adenine, cytosine, or uracil. Hence, nucleotides containing uracil, guanine, or adenine can be replaced in the nucleotide sequences of dsRNA featured in the invention by a nucleotide containing, for example, inosine. In another example, adenine and cytosine anywhere in the oligonucleotide can be replaced with guanine and uracil, respectively to form G-U Wobble base pairing with the target mRNA. Sequences containing such replacement moieties are suitable for the compositions and methods featured in the invention.

[0102] The terms “iRNA”, “RNAi agent,” “iRNA agent,”, “RNA interference agent” as used interchangeably herein, refer to an agent that contains RNA as that term is defined herein, and which mediates the targeted cleavage of an RNA transcript via an RNA-induced silencing complex (RISC) pathway. iRNA directs the sequence-specific degradation of mRNA through a process known as RNA interference (RNAi). The iRNA modulates, e.g., inhibits, the expression of a complement component 9 (C9) gene in a cell, e.g., a cell within a subject, such as a mammalian subject.

[0103] In one embodiment, an RNAi agent of the invention includes a single stranded RNA that interacts with a target RNA sequence, e.g., a C9 target mRNA sequence, to direct the cleavage of the target RNA. Without wishing to be bound by theory it is believed that long double stranded RNA introduced into cells is broken down into siRNA by a Type III endonuclease known as Dicer (Sharp et al. (2001) Genes Dev. 15:485). Dicer, a ribonuclease-III-like enzyme, processes the dsRNA into 19-23 base pair short interfering RNAs with characteristic two base 3′ overhangs (Bernstein, et al., (2001) Nature 409:363). The siRNAs are then incorporated into an RNA-induced silencing complex (RISC) where one or more helicases unwind the siRNA duplex, enabling the complementary antisense strand to guide target recognition (Nykanen, et al., (2001) Cell 107:309). Upon binding to the appropriate target mRNA, one or more endonucleases within the RISC cleave the target to induce silencing (Elbashir, et al., (2001) Genes Dev. 15:188). Thus, in one aspect the invention relates to a single stranded RNA (siRNA) generated within a cell and which promotes the formation of a RISC complex to effect silencing of the target gene, i.e., a C9 gene. Accordingly, the term “siRNA” is also used herein to refer to an iRNA as described above.

[0104] In certain embodiments, the RNAi agent may be a single-stranded siRNA (ssRNAi) that is introduced into a cell or organism to inhibit a target mRNA. Single-stranded RNAi agents bind to the RISC endonuclease, Argonaute 2, which then cleaves the target mRNA. The single-stranded siRNAs are generally 15-30 nucleotides and are chemically modified. The design and testing of single-stranded siRNAs are described in U.S. Pat. No. 8,101,348 and in Lima et al., (2012) Cell 150:883-894, the entire contents of each of which are hereby incorporated herein by reference. Any of the antisense nucleotide sequences described herein may be used as a single-stranded siRNA as described herein or as chemically modified by the methods described in Lima et al., (2012) Cell 150:883-894.

[0105] In certain embodiments, an “iRNA” for use in the compositions, uses, and methods of the invention is a double stranded RNA and is referred to herein as a “double stranded RNA agent,” “double stranded RNA (dsRNA) molecule,” “dsRNA agent,” or “dsRNA”. The term “dsRNA”, refers to a complex of ribonucleic acid molecules, having a duplex structure comprising two anti-parallel and substantially complementary nucleic acid strands, referred to as having “sense” and “antisense” orientations with respect to a target RNA, i.e., a C9 gene. In some embodiments of the invention, a double stranded RNA (dsRNA) triggers the degradation of a target RNA, e.g., an mRNA, through a post-transcriptional gene-silencing mechanism referred to herein as RNA interference or RNAi.

[0106] In general, the majority of nucleotides of each strand of a dsRNA molecule are ribonucleotides, but as described in detail herein, each or both strands can also include one or more non-ribonucleotides, e.g., a deoxyribonucleotide or a modified nucleotide. In addition, as used in this specification, an “iRNA” may include ribonucleotides with chemical modifications; an iRNA may include substantial modifications at multiple nucleotides. As used herein, the term “modified nucleotide” refers to a nucleotide having, independently, a modified sugar moiety, a modified internucleotide linkage, or modified nucleobase, or any combination thereof. Thus, the term modified nucleotide encompasses substitutions, additions or removal of, e.g., a functional group or atom, to internucleoside linkages, sugar moieties, or nucleobases. The modifications suitable for use in the agents of the invention include all types of modifications disclosed herein or known in the art. Any such modifications, as used in a siRNA type molecule, are encompassed by “iRNA” or “RNAi agent” for the purposes of this specification and claims.

[0107] In certain embodiments of the instant disclosure, inclusion of a deoxy-nucleotide if present within an RNAi agent can be considered to constitute a modified nucleotide.

[0108] The duplex region may be of any length that permits specific degradation of a desired target RNA through a RISC pathway, and may range from about 19 to 36 base pairs in length, e.g., about 19-30 base pairs in length, for example, about 9, 10, 11, 12, 13, 14, 15, 16, 17, 18, 19, 20, 21, 22, 23, 24, 25, 26, 27, 28, 29, 30, 31, 32, 33, 34, 35, or 36 base pairs in length, such as about 19-30, 19-29, 19-28, 19-27, 19-26, 19-25, 19-24, 19-23, 19-22, 19-21, 19-20, 20-30, 20-29, 20-28, 20-27, 20-26, 20-25, 20-24,20-23, 20-22, 20-21, 21-30, 21-29, 21-28, 21-27, 21-26, 21-25, 21-24, 21-23, or 21-22 base pairs in length. In certain embodiments, the duplex region is 19-21 base pairs in length, e.g., 21 base pairs in length. Ranges and lengths intermediate to the above recited ranges and lengths are also contemplated to be part of the disclosure.

[0109] The two strands forming the duplex structure may be different portions of one larger RNA molecule, or they may be separate RNA molecules. Where the two strands are part of one larger molecule, and therefore are connected by an uninterrupted chain of nucleotides between the 3′-end of one strand and the 5′-end of the respective other strand forming the duplex structure, the connecting RNA chain is referred to as a “hairpin loop.” A hairpin loop can comprise at least one unpaired nucleotide. In some embodiments, the hairpin loop can comprise at least 2, 3, 4, 5, 6, 7, 8, 9, 10, 20, 23 or more unpaired nucleotides. In some embodiments, the hairpin loop can be 10 or fewer nucleotides. In some embodiments, the hairpin loop can be 8 or fewer unpaired nucleotides. In some embodiments, the hairpin loop can be 4-10 unpaired nucleotides. In some embodiments, the hairpin loop can be 4-8 nucleotides.

[0110] Where the two substantially complementary strands of a dsRNA are comprised by separate RNA molecules, those molecules need not be, but can be covalently connected. Where the two strands are connected covalently by means other than an uninterrupted chain of nucleotides between the 3′-end of one strand and the 5′-end of the respective other strand forming the duplex structure, the connecting structure is referred to as a “linker.” The RNA strands may have the same or a different number of nucleotides. The maximum number of base pairs is the number of nucleotides in the shortest strand of the dsRNA minus any overhangs that are present in the duplex. In addition to the duplex structure, an RNAi may comprise one or more nucleotide overhangs. In one embodiment of the RNAi agent, at least one strand comprises a 3′ overhang of at least 1 nucleotide. In another embodiment, at least one strand comprises a 3′ overhang of at least 2 nucleotides, e.g., 2, 3, 4, 5, 6, 7, 9, 10, 11, 12, 13, 14, or 15 nucleotides. In other embodiments, at least one strand of the RNAi agent comprises a 5′ overhang of at least 1 nucleotide. In certain embodiments, at least one strand comprises a 5′ overhang of at least 2 nucleotides, e.g., 2, 3, 4, 5, 6, 7, 9, 10, 11, 12, 13, 14, or 15 nucleotides. In still other embodiments, both the 3′ and the 5′ end of one strand of the RNAi agent comprise an overhang of at least 1 nucleotide.

[0111] In certain embodiments, an iRNA agent of the invention is a dsRNA, each strand of which comprises 19-23 nucleotides, that interacts with a target RNA sequence, e.g., a complement component 9 (C9) gene, to direct cleavage of the target RNA.

[0112] In some embodiments, an iRNA of the invention is a dsRNA of 24-30 nucleotides that interacts with a target RNA sequence, e.g., a C9 target mRNA sequence, to direct the cleavage of the target RNA.

[0113] As used herein, the term “nucleotide overhang” refers to at least one unpaired nucleotide that protrudes from the duplex structure of a double stranded iRNA. For example, when a 3-end of one strand of a dsRNA extends beyond the 5-end of the other strand, or vice versa, there is a nucleotide overhang. A dsRNA can comprise an overhang of at least one nucleotide; alternatively the overhang can comprise at least two nucleotides, at least three nucleotides, at least four nucleotides, at least five nucleotides or more. A nucleotide overhang can comprise or consist of a nucleotide/nucleoside analog, including a deoxynucleotide/nucleoside. The overhang(s) can be on the sense strand, the antisense strand, or any combination thereof. Furthermore, the nucleotide(s) of an overhang can be present on the 5-end, 3-end, or both ends of either an antisense or sense strand of a dsRNA.

[0114] In one embodiment, the antisense strand of a dsRNA has a 1-10 nucleotide, e.g., a 1, 2, 3, 4, 5, 6, 7, 8, 9, or 10 nucleotide, overhang at the 3′-end or the 5′-end. In one embodiment, the sense strand of a dsRNA has a 1-10 nucleotide, e.g., a 1, 2, 3, 4, 5, 6, 7, 8, 9, or 10 nucleotide, overhang at the 3′-end or the 5′-end. In another embodiment, one or more of the nucleotides in the overhang is replaced with a nucleoside thiophosphate.

[0115] In certain embodiments, the antisense strand of a dsRNA has a 1-10 nucleotide, e.g., 0-3, 1-3, 2-4, 2-5, 4-10, 5-10, e.g., a 1, 2, 3, 4, 5, 6, 7, 8, 9, or 10 nucleotide, overhang at the 3′-end or the 5′-end. In one embodiment, the sense strand of a dsRNA has a 1-10 nucleotide, e.g., a 1, 2, 3, 4, 5, 6, 7, 8, 9, or 10 nucleotide, overhang at the 3′-end or the 5′-end. In another embodiment, one or more of the nucleotides in the overhang is replaced with a nucleoside thiophosphate.

[0116] In certain embodiments, the antisense strand of a dsRNA has a 1-10 nucleotides, e.g., a 1, 2, 3, 4, 5, 6, 7, 8, 9, or 10 nucleotide, overhang at the 3′-end or the 5′-end. In certain embodiments, the overhang on the sense strand or the antisense strand, or both, can include extended lengths longer than 10 nucleotides, e.g., 1-30 nucleotides, 2-30 nucleotides, 10-30 nucleotides, 10-25 nucleotides, 10-20 nucleotides, or 10-15 nucleotides in length. In certain embodiments, an extended overhang is on the sense strand of the duplex. In certain embodiments, an extended overhang is present on the 3′ end of the sense strand of the duplex. In certain embodiments, an extended overhang is present on the 5′ end of the sense strand of the duplex. In certain embodiments, an extended overhang is on the antisense strand of the duplex. In certain embodiments, an extended overhang is present on the 3′end of the antisense strand of the duplex. In certain embodiments, an extended overhang is present on the 5′end of the antisense strand of the duplex. In certain embodiments, one or more of the nucleotides in the extended overhang is replaced with a nucleoside thiophosphate. In certain embodiments, the overhang includes a self-complementary portion such that the overhang is capable of forming a hairpin structure that is stable under physiological conditions.

[0117] “Blunt” or “blunt end” means that there are no unpaired nucleotides at that end of the double stranded RNA agent, i.e., no nucleotide overhang. A “blunt ended” double stranded RNA agent is double stranded over its entire length, i.e., no nucleotide overhang at either end of the molecule. The RNAi agents of the invention include RNAi agents with no nucleotide overhang at one end (i.e., agents with one overhang and one blunt end) or with no nucleotide overhangs at either end. Most often such a molecule will be double-stranded over its entire length.

[0118] The term “antisense strand” or “guide strand” refers to the strand of an iRNA, e.g., a dsRNA, which includes a region that is substantially complementary to a target sequence, e.g., a C9 mRNA.

[0119] As used herein, the term “region of complementarity” refers to the region on the antisense strand that is substantially complementary to a sequence, for example a target sequence, e.g., a C9 nucleotide sequence, as defined herein. Where the region of complementarity is not fully complementary to the target sequence, the mismatches can be in the internal or terminal regions of the molecule. Generally, the most tolerated mismatches are in the terminal regions, e.g., within 5, 4, or 3 nucleotides of the 5′- or 3′-end of the iRNA. In some embodiments, a double stranded RNA agent of the invention includes a nucleotide mismatch in the antisense strand. In some embodiments, the antisense strand of the double stranded RNA agent of the invention includes no more than 4 mismatches with the target mRNA, e.g., the antisense strand includes 4, 3, 2, 1, or 0 mismatches with the target mRNA. In some embodiments, the antisense strand double stranded RNA agent of the invention includes no more than 4 mismatches with the sense strand, e.g., the antisense strand includes 4, 3, 2, 1, or 0 mismatches with the sense strand. In some embodiments, a double stranded RNA agent of the invention includes a nucleotide mismatch in the sense strand. In some embodiments, the sense strand of the double stranded RNA agent of the invention includes no more than 4 mismatches with the antisense strand, e.g., the sense strand includes 4, 3, 2, 1, or 0 mismatches with the antisense strand. In some embodiments, the nucleotide mismatch is, for example, within 5, 4, 3 nucleotides from the 3′-end of the iRNA. In another embodiment, the nucleotide mismatch is, for example, in the 3′-terminal nucleotide of the iRNA agent. In some embodiments, the mismatch(s) is not in the seed region.

[0120] Thus, an RNAi agent as described herein can contain one or more mismatches to the target sequence. In one embodiment, a RNAi agent as described herein contains no more than 3 mismatches (i.e., 3, 2, 1, or 0 mismatches). In one embodiment, an RNAi agent as described herein contains no more than 2 mismatches. In one embodiment, an RNAi agent as described herein contains no more than 1 mismatch. In one embodiment, an RNAi agent as described herein contains 0 mismatches. In certain embodiments, if the antisense strand of the RNAi agent contains mismatches to the target sequence, the mismatch can optionally be restricted to be within the last 5 nucleotides from either the 5′- or 3′-end of the region of complementarity. For example, in such embodiments, for a 23 nucleotide RNAi agent, the strand which is complementary to a region of a C9 gene, generally does not contain any mismatch within the central 13 nucleotides. The methods described herein or methods known in the art can be used to determine whether an RNAi agent containing a mismatch to a target sequence is effective in inhibiting the expression of a C9 gene. Consideration of the efficacy of RNAi agents with mismatches in inhibiting expression of a C9 gene is important, especially if the particular region of complementarity in a C9 gene is known to have polymorphic sequence variation within the population.

[0121] The term “sense strand” or “passenger strand” as used herein, refers to the strand of an iRNA that includes a region that is substantially complementary to a region of the antisense strand as that term is defined herein.

[0122] As used herein, “substantially all of the nucleotides are modified” are largely but not wholly modified and can include not more than 5, 4, 3, 2, or 1 unmodified nucleotides.

[0123] As used herein, the term “cleavage region” refers to a region that is located immediately adjacent to the cleavage site. The cleavage site is the site on the target at which cleavage occurs. In some embodiments, the cleavage region comprises three bases on either end of, and immediately adjacent to, the cleavage site. In some embodiments, the cleavage region comprises two bases on either end of, and immediately adjacent to, the cleavage site. In some embodiments, the cleavage site specifically occurs at the site bound by nucleotides 10 and 11 of the antisense strand, and the cleavage region comprises nucleotides 11, 12 and 13.

[0124] As used herein, and unless otherwise indicated, the term “complementary,” when used to describe a first nucleotide sequence in relation to a second nucleotide sequence, refers to the ability of an oligonucleotide or polynucleotide comprising the first nucleotide sequence to hybridize and form a duplex structure under certain conditions with an oligonucleotide or polynucleotide comprising the second nucleotide sequence, as will be understood by the skilled person. Such conditions can, for example, be stringent conditions, where stringent conditions can include: 400 mM NaCl, 40 mM PIPES pH 6.4, 1 mM EDTA, 50° C. or 70° C. for 12-16 hours followed by washing (see, e.g., “Molecular Cloning: A Laboratory Manual, Sambrook, et al. (1989) Cold Spring Harbor Laboratory Press). Other conditions, such as physiologically relevant conditions as can be encountered inside an organism, can apply. The skilled person will be able to determine the set of conditions most appropriate for a test of complementarity of two sequences in accordance with the ultimate application of the hybridized nucleotides.

[0125] Complementary sequences within an iRNA, e.g., within a dsRNA as described herein, include base-pairing of the oligonucleotide or polynucleotide comprising a first nucleotide sequence to an oligonucleotide or polynucleotide comprising a second nucleotide sequence over the entire length of one or both nucleotide sequences. Such sequences can be referred to as “fully complementary” with respect to each other herein. However, where a first sequence is referred to as “substantially complementary” with respect to a second sequence herein, the two sequences can be fully complementary, or they can form one or more, but generally not more than 5, 4, 3, or 2 mismatched base pairs upon hybridization for a duplex up to 30 base pairs, while retaining the ability to hybridize under the conditions most relevant to their ultimate application, e.g., inhibition of gene expression via a RISC pathway. However, where two oligonucleotides are designed to form, upon hybridization, one or more single stranded overhangs, such overhangs shall not be regarded as mismatches with regard to the determination of complementarity. For example, a dsRNA comprising one oligonucleotide 21 nucleotides in length and another oligonucleotide 23 nucleotides in length, wherein the longer oligonucleotide comprises a sequence of 21 nucleotides that is fully complementary to the shorter oligonucleotide, can yet be referred to as “fully complementary” for the purposes described herein.

[0126] “Complementary” sequences, as used herein, can also include, or be formed entirely from, non-Watson-Crick base pairs or base pairs formed from non-natural and modified nucleotides, in so far as the above requirements with respect to their ability to hybridize are fulfilled. Such non-Watson-Crick base pairs include, but are not limited to, G:U Wobble or Hoogstein base pairing.

[0127] The terms “complementary,” “fully complementary” and “substantially complementary” herein can be used with respect to the base matching between the sense strand and the antisense strand of a dsRNA, or between the antisense strand of a double stranded RNA agent and a target sequence, as will be understood from the context of their use.

[0128] As used herein, a polynucleotide that is “substantially complementary to at least part of” a messenger RNA (mRNA) refers to a polynucleotide that is substantially complementary to a contiguous portion of the mRNA of interest (e.g., an mRNA encoding a complement component 9 gene). For example, a polynucleotide is complementary to at least a part of a complement component 9 mRNA if the sequence is substantially complementary to a non-interrupted portion of an mRNA encoding a complement component 9 gene.

[0129] Accordingly, in some embodiments, the antisense polynucleotides disclosed herein are fully complementary to the target C9 sequence. In other embodiments, the antisense polynucleotides disclosed herein are substantially complementary to the target C9 sequence and comprise a contiguous nucleotide sequence which is at least 80% complementary over its entire length to the equivalent region of the nucleotide sequence of any one of SEQ ID NOs:1, 3, 5, or 7, or a fragment of any one of SEQ ID NOs:1-1, 3, 5, or 7, such as about 85%, about 90%, about 91%, about 92%, about 93%, about 94%, about 95%, about 96%, about 97%, about 98%, or about 99% complementary.

[0130] In other embodiments, the antisense polynucleotides disclosed herein are substantially complementary to the target C9 sequence and comprise a contiguous nucleotide sequence which is at least about 80% complementary over its entire length to any one of the sense strand nucleotide sequences in any one of any one of Tables 2-3, or a fragment of any one of the sense strand nucleotide sequences in any one of Tables 2-3, such as about 85%, about 90%, about 91%, about 92%, about 93%, about 94%, about 95%, about 96%, about 97%, about 98%, about 99%, or 100% complementary.

[0131] In one embodiment, an RNAi agent of the disclosure includes a sense strand that is substantially complementary to an antisense polynucleotide which, in turn, is the same as a target C9 sequence, and wherein the sense strand polynucleotide comprises a contiguous nucleotide sequence which is at least about 80% complementary over its entire length to the equivalent region of the nucleotide sequence of SEQ ID NOs: 2, 4, 6, or 8, or a fragment of any one of SEQ ID NOs:2, 4, 6, or 8, such as about 85%, about 90%, about 91%, about 92%, about 93%, about 94%, about 95%, about 96%, about 97%, about 98%, about 99%, or 100% complementary.

[0132] In some embodiments, an iRNA of the invention includes a sense strand that is substantially complementary to an antisense polynucleotide which, in turn, is complementary to a target C9 sequence, and wherein the sense strand polynucleotide comprises a contiguous nucleotide sequence which is at least about 80% complementary over its entire length to any one of the antisense strand nucleotide sequences in any one of any one of Tables 2-3, or a fragment of any one of the antisense strand nucleotide sequences in any one of Tables 2-3, such as about 85%, about 90%, about 91%, about 92%, about 93%, about 94%, about 95%, about 96%, about 97%, about 98%, about 99%, or 100% complementary

[0133] In general, an “iRNA” includes ribonucleotides with chemical modifications. Such modifications may include all types of modifications disclosed herein or known in the art. Any such modifications, as used in a dsRNA molecule, are encompassed by “iRNA” for the purposes of this specification and claims.

[0134] In certain embodiments of the instant disclosure, inclusion of a deoxy-nucleotide if present within an RNAi agent can be considered to constitute a modified nucleotide.

[0135] In an aspect of the invention, an agent for use in the methods and compositions of the invention is a single-stranded antisense oligonucleotide molecule that inhibits a target mRNA via an antisense inhibition mechanism. The single-stranded antisense oligonucleotide molecule is complementary to a sequence within the target mRNA. The single-stranded antisense oligonucleotides can inhibit translation in a stoichiometric manner by base pairing to the mRNA and physically obstructing the translation machinery, see Dias, N. et al., (2002) Mol Cancer Ther 1:347-355. The single-stranded antisense oligonucleotide molecule may be about 14 to about 30 nucleotides in length and have a sequence that is complementary to a target sequence. For example, the single-stranded antisense oligonucleotide molecule may comprise a sequence that is at least about 14, 15, 16, 17, 18, 19, 20, or more contiguous nucleotides from any one of the antisense sequences described herein.

[0136] The phrase “contacting a cell with an iRNA,” such as a dsRNA, as used herein, includes contacting a cell by any possible means. Contacting a cell with an iRNA includes contacting a cell in vitro with the iRNA or contacting a cell in vivo with the iRNA. The contacting may be done directly or indirectly. Thus, for example, the iRNA may be put into physical contact with the cell by the individual performing the method, or alternatively, the iRNA may be put into a situation that will permit or cause it to subsequently come into contact with the cell.

[0137] Contacting a cell in vitro may be done, for example, by incubating the cell with the iRNA. Contacting a cell in vivo may be done, for example, by injecting the iRNA into or near the tissue where the cell is located, or by injecting the iRNA into another area, e.g., the bloodstream or the subcutaneous space, such that the agent will subsequently reach the tissue where the cell to be contacted is located. For example, the iRNA may contain or be coupled to a ligand, e.g., GalNAc, that directs the iRNA to a site of interest, e.g., the liver. Combinations of in vitro and in vivo methods of contacting are also possible. For example, a cell may also be contacted in vitro with an iRNA and subsequently transplanted into a subject.

[0138] In certain embodiments, contacting a cell with an iRNA includes “introducing” or “delivering the iRNA into the cell” by facilitating or effecting uptake or absorption into the cell. Absorption or uptake of an iRNA can occur through unaided diffusion or active cellular processes, or by auxiliary agents or devices. Introducing an iRNA into a cell may be in vitro or in vivo. For example, for in vivo introduction, iRNA can be injected into a tissue site or administered systemically. In vitro introduction into a cell includes methods known in the art such as electroporation and lipofection. Further approaches are described herein below or are known in the art.

[0139] The term “lipid nanoparticle” or “LNP” is a vesicle comprising a lipid layer encapsulating a pharmaceutically active molecule, such as a nucleic acid molecule, e.g., an iRNA or a plasmid from which an iRNA is transcribed. LNPs are described in, for example, U.S. Pat. Nos. 6,858,225, 6,815,432, 8,158,601, and 8,058,069, the entire contents of which are hereby incorporated herein by reference.

[0140] As used herein, a “subject” is an animal, such as a mammal, including a primate (such as a human, a non-human primate, e.g., a monkey, and a chimpanzee), a non-primate (such as a cow, a pig, a horse, a goat, a rabbit, a sheep, a hamster, a guinea pig, a cat, a dog, a rat, or a mouse), or a bird that expresses the target gene, either endogenously or heterologously. In an embodiment, the subject is a human, such as a human being treated or assessed for a disease or disorder that would benefit from reduction in C9 expression; a human at risk for a disease or disorder that would benefit from reduction in C9 expression; a human having a disease or disorder that would benefit from reduction in C9 expression; or human being treated for a disease or disorder that would benefit from reduction in C9 expression as described herein. In some embodiments, the subject is a female human. In other embodiments, the subject is a male human. In one embodiment, the subject is an adult subject. In another embodiment, the subject is a pediatric subject.

[0141] As used herein, the terms “treating” or “treatment” refer to a beneficial or desired result, such as reducing at least one sign or symptom of a C9-associated disorder in a subject. Treatment also includes a reduction of one or more sign or symptoms associated with unwanted C9 expression; diminishing the extent of unwanted C9 activation or stabilization; amelioration or palliation of unwanted C9 activation or stabilization. “Treatment” can also mean prolonging survival as compared to expected survival in the absence of treatment. The term “lower” in the context of the level of C9 in a subject or a disease marker or symptom refers to a statistically significant decrease in such level. The decrease can be, for example, at least 10%, 15%, 20%, 25%, 30%, %, 40%, 45%, 50%, 55%, 60%, 65%, 70%, 75%, 80%, 85%, 90%, 95%, or more. In certain embodiments, a decrease is at least 20%. In certain embodiments, the decrease is at least 50% in a disease marker, e.g., protein or gene expression level. “Lower” in the context of the level of C9 in a subject is preferably down to a level accepted as within the range of normal for an individual without such disorder. In certain embodiments, “lower” is the decrease in the difference between the level of a marker or symptom for a subject suffering from a disease and a level accepted within the range of normal for an individual. For example, efficacy of treatment of a C9-associated disorder may be assessed, for example, by periodic monitoring of MAC complex formation, LDH and CH50 levels. Comparisons of the later readings with the initial readings provide a physician an indication of whether the treatment is effective. It is well within the ability of one skilled in the art to monitor efficacy of treatment or prevention by measuring any one of such parameters, or any combination of parameters.

[0142] As used herein, “prevention” or “preventing,” when used in reference to a disease, disorder or condition thereof, may be treated or ameliorated by a reduction in expression of a C9 gene, refers to a reduction in the likelihood that a subject will develop a symptom associated with such a disease, disorder, or condition, e.g., a symptom of unwanted or excessive C9 expression, such as MAC complex formation and/or hemolysis. The likelihood of developing, e.g., hemolysis, is reduced, for example, when an individual having one or more risk factors for hemolysis either fails to develop hemolysis or develops hemolysis with less severity relative to a population having the same risk factors and not receiving treatment as described herein. The failure to develop a disease, disorder or condition, or the reduction in the development of a symptom associated with such a disease, disorder or condition (e.g., by at least about 10% on a clinically accepted scale for that disease or disorder), or the exhibition of delayed symptoms delayed (e.g., by days, weeks, months or years) is considered effective prevention.

[0143] As used herein, the term “complement component 9 (C9)-associated disease” or “C9-associated disease,” is a disease, disorder or a condition that is caused by, or is associated with, unwanted or excessive C9 expression, MAC complex formation, and/or complement activation. The term “C9-associated disease” includes a disease, disorder or condition that may be treated or ameliorated by a reduction in C9 expression. Such diseases are typically associated with inflammation and/or immune system activation, e.g., membrane attack complex-mediated lysis, anaphylaxis, and/or hemolysis. Non-limiting examples of complement component 9-associated diseases include paroxysmal nocturnal hemoglobinuria (PNH), atypical hemolytic uremic syndrome (aHUS), myasthenia gravis (MG), macular degeneration (e.g., age-related macular degeneration (AMD)); asthma, rheumatoid arthritis (RA); antiphospholipid antibody syndrome; lupus nephritis; ischemia-reperfusion injury; typical or infectious hemolytic uremic syndrome (tHUS); dense deposit disease (DDD); neuromyelitis optica (NMO); multifocal motor neuropathy (MMN); multiple sclerosis (MS); hemolysis, elevated liver enzymes, and low platelets (HELLP) syndrome; thrombotic thrombocytopenic purpura (TTP); spontaneous fetal loss; Pauci-immune vasculitis; epidermolysis bullosa; recurrent fetal loss; pre-eclampsia, traumatic brain injury, cold agglutinin disease, dermatomyositis bullous pemphigoid, Shiga toxin E. coli-related hemolytic uremic syndrome, C3 neuropathy, anti-neutrophil cytoplasmic antibody-associated vasculitis (e.g., granulomatosis with polyangiitis (previously known as Wegener granulomatosis), Churg-Strauss syndrome, and microscopic polyangiitis), humoral and vascular transplant rejection, graft dysfunction, myocardial infarction (e.g., tissue damage and ischemia in myocardial infarction), an allogenic transplant, sepsis (e.g., poor outcome in sepsis), Coronary artery disease, dermatomyositis, Graves' disease, atherosclerosis, Alzheimer's disease, systemic inflammatory response sepsis, septic shock, spinal cord injury, glomerulonephritis, Hashimoto's thyroiditis, type I diabetes, psoriasis, pemphigus, autoimmune hemolytic anemia (AIHA), ITP, Goodpasture syndrome, Degos disease, antiphospholipid syndrome (APS), catastrophic APS (CAPS), a cardiovascular disorder, myocarditis, a cerebrovascular disorder, a peripheral (e.g., musculoskeletal) vascular disorder, a renovascular disorder, a mesenteric/enteric vascular disorder, vasculitis, Henoch-Schönlein purpura nephritis, systemic lupus erythematosus-associated vasculitis, vasculitis associated with rheumatoid arthritis, immune complex vasculitis, Takayasu's disease, dilated cardiomyopathy, diabetic angiopathy, Kawasaki's disease (arteritis), venous gas embolus (VGE), and restenosis following stent placement, rotational atherectomy, and percutaneous transluminal coronary angioplasty (PTCA) (see, e.g., Holers (2008) Immunological Reviews 223:300-316; Holers and Thurman (2004) Molecular Immunology 41:147-152; U.S. Patent Publication No. 20070172483).

[0144] In one embodiment, a C9-associated disease is paroxysmal nocturnal hemoglobinuria (PNH). The PNH may be classical PNH or PNH in the setting of another bone marrow failure syndrome and/or myelodysplastic syndromes (MDS), e.g., cytopenias. In another embodiment, a C9-associated disease is atypical hemolytic uremic syndrome (aHUS). In yet another embodiment, a C9-associated disease is myasthenia gravis (MG).

[0145] “Therapeutically effective amount,” as used herein, is intended to include the amount of an RNAi agent that, when administered to a subject having a C9-associated disease, is sufficient to effect treatment of the disease (e.g., by diminishing, ameliorating, or maintaining the existing disease or one or more symptoms of disease). The “therapeutically effective amount” may vary depending on the RNAi agent, how the agent is administered, the disease and its severity and the history, age, weight, family history, genetic makeup, the types of preceding or concomitant treatments, if any, and other individual characteristics of the subject to be treated.

[0146] “Prophylactically effective amount,” as used herein, is intended to include the amount of an RNAi agent that, when administered to a subject having a C9-associated disorder, and/or a subject at risk of developing a C9-associated disease, e.g., a subject having a graft and/or transplant, e.g., a sensitized or allogenic recipient, a subject having sepsis, and/or a subject having a myocardial infarction, is sufficient to prevent or ameliorate the disease or one or more symptoms of the disease. Ameliorating the disease includes slowing the course of the disease or reducing the severity of later-developing disease. The “prophylactically effective amount” may vary depending on the RNAi agent, how the agent is administered, the degree of risk of disease, and the history, age, weight, family history, genetic makeup, the types of preceding or concomitant treatments, if any, and other individual characteristics of the patient to be treated.

[0147] A “therapeutically-effective amount” or “prophylactically effective amount” also includes an amount of an RNAi agent that produces some desired effect at a reasonable benefit/risk ratio applicable to any treatment. The iRNA employed in the methods of the present invention may be administered in a sufficient amount to produce a reasonable benefit/risk ratio applicable to such treatment.

[0148] The phrase “pharmaceutically acceptable” is employed herein to refer to those compounds, materials, compositions, or dosage forms which are, within the scope of sound medical judgment, suitable for use in contact with the tissues of human subjects and animal subjects without excessive toxicity, irritation, allergic response, or other problem or complication, commensurate with a reasonable benefit/risk ratio.

[0149] The phrase “pharmaceutically-acceptable carrier” as used herein means a pharmaceutically-acceptable material, composition, or vehicle, such as a liquid or solid filler, diluent, excipient, manufacturing aid (e.g., lubricant, talc magnesium, calcium or zinc stearate, or steric acid), or solvent encapsulating material, involved in carrying or transporting the subject compound from one organ, or portion of the body, to another organ, or portion of the body. Each carrier must be “acceptable” in the sense of being compatible with the other ingredients of the formulation and not injurious to the subject being treated. Such carriers are known in the art. Pharmaceutically acceptable carriers include carriers for administration by injection.

[0150] The term “sample,” as used herein, includes a collection of similar fluids, cells, or tissues isolated from a subject, as well as fluids, cells, or tissues present within a subject. Examples of biological fluids include blood, serum and serosal fluids, plasma, cerebrospinal fluid, ocular fluids, lymph, urine, saliva, and the like. Tissue samples may include samples from tissues, organs, or localized regions. For example, samples may be derived from particular organs, parts of organs, or fluids or cells within those organs. In certain embodiments, samples may be derived from the liver (e.g., whole liver or certain segments of liver or certain types of cells in the liver, such as, e.g., hepatocytes). In some embodiments, a “sample derived from a subject” refers to urine obtained from the subject. A “sample derived from a subject” can refer to blood or blood derived serum or plasma from the subject.

### II. iRNAs of the Invention

[0151] The present invention provides iRNAs which inhibit the expression of a complement component 9 (C9) gene. In preferred embodiments, the iRNA includes double stranded ribonucleic acid (dsRNA) molecules for inhibiting the expression of a C9 gene in a cell, such as a cell within a subject, e.g., a mammal, such as a human susceptible to developing a C9-associated disorder, e.g., paroxysmal nocturnal hemoglobinuria, atypical hemolytic uremic syndrome or myasthenia gravis (MG). The dsRNAi agent includes an antisense strand having a region of complementarity which is complementary to at least a part of an mRNA formed in the expression of a C9 gene. The region of complementarity is about 19-30 nucleotides in length (e.g., about 30, 29, 28, 27, 26, 25, 24, 23, 22, 21, 20, or 19 nucleotides in length). Upon contact with a cell expressing the C9 gene, the iRNA inhibits the expression of the C9 gene (e.g., a human, a primate, a non-primate, or a rat C9 gene) by at least about 50% as assayed by, for example, a PCR or branched DNA (bDNA)-based method, or by a protein-based method, such as by immunofluorescence analysis, using, for example, western blotting or flow cytometric techniques. In preferred embodiments, inhibition of expression is determined by the qPCR method provided in the examples herein with the siRNA at, e.g., a 10 nM concentration, in an appropriate organism cell line provided therein. In preferred embodiments, inhibition of expression in vivo is determined by knockdown of the human gene in a rodent expressing the human gene, e.g., a mouse or an AAV-infected mouse expressing the human target gene, e.g., when administered as single dose, e.g., at 3 mg/kg at the nadir of RNA expression.

[0152] A dsRNA includes two RNA strands that are complementary and hybridize to form a duplex structure under conditions in which the dsRNA will be used. One strand of a dsRNA (the antisense strand) includes a region of complementarity that is substantially complementary, and generally fully complementary, to a target sequence. The target sequence can be derived from the sequence of an mRNA formed during the expression of a C9 gene. The other strand (the sense strand) includes a region that is complementary to the antisense strand, such that the two strands hybridize and form a duplex structure when combined under suitable conditions. As described elsewhere herein and as known in the art, the complementary sequences of a dsRNA can also be contained as self-complementary regions of a single nucleic acid molecule, as opposed to being on separate oligonucleotides.

[0153] Generally, the duplex structure is 15 to 30 base pairs in length, e.g., 15-29, 15-28, 15-27, 15-26, 15-25, 15-24, 15-23, 15-22, 15-21, 15-20, 15-19, 15-18, 15-17, 18-30, 18-29, 18-28, 18-27, 18-26, 18-25, 18-24, 18-23, 18-22, 18-21, 18-20, 19-30, 19-29, 19-28, 19-27, 19-26, 19-25, 19-24, 19-23, 19-22, 19-21, 19-20, 20-30, 20-29, 20-28, 20-27, 20-26, 20-25, 20-24,20-23, 20-22, 20-21, 21-30, 21-29, 21-28, 21-27, 21-26, 21-25, 21-24, 21-23, or 21-22 base pairs in length. In certain preferred embodiments, the duplex structure is 18 to 25 base pairs in length, e.g., 18-25, 18-24, 18-23, 18-22, 18-21, 18-20, 19-25, 19-24, 19-23, 19-22, 19-21, 19-20, 20-25, 20-24,20-23, 20-22, 20-21, 21-25, 21-24, 21-23, 21-22, 22-25, 22-24, 22-23, 23-25, 23-24 or 24-25 base pairs in length, for example, 19-21 basepairs in length. Ranges and lengths intermediate to the above recited ranges and lengths are also contemplated to be part of the disclosure.

[0154] Similarly, the region of complementarity to the target sequence is 15 to 30 nucleotides in length, e.g., 15-29, 15-28, 15-27, 15-26, 15-25, 15-24, 15-23, 15-22, 15-21, 15-20, 15-19, 15-18, 15-17, 18-30, 18-29, 18-28, 18-27, 18-26, 18-25, 18-24, 18-23, 18-22, 18-21, 18-20, 19-30, 19-29, 19-28, 19-27, 19-26, 19-25, 19-24, 19-23, 19-22, 19-21, 19-20, 20-30, 20-29, 20-28, 20-27, 20-26, 20-25, 20-24,20-23, 20-22, 20-21, 21-30, 21-29, 21-28, 21-27, 21-26, 21-25, 21-24, 21-23, or 21-22 nucleotides in length, for example 19-23 nucleotides in length or 21-23 nucleotides in length. Ranges and lengths intermediate to the above recited ranges and lengths are also contemplated to be part of the disclosure.

[0155] In some embodiments, the duplex structure is 19 to 30 base pairs in length. Similarly, the region of complementarity to the target sequence is 19 to 30 nucleotides in length.

[0156] In some embodiments, the dsRNA is about 19 to about 23 nucleotides in length, or about 25 to about 30 nucleotides in length. In general, the dsRNA is long enough to serve as a substrate for the Dicer enzyme. For example, it is well-known in the art that dsRNAs longer than about 21-23 nucleotides in length may serve as substrates for Dicer. As the ordinarily skilled person will also recognize, the region of an RNA targeted for cleavage will most often be part of a larger RNA molecule, often an mRNA molecule. Where relevant, a “part” of an mRNA target is a contiguous sequence of an mRNA target of sufficient length to allow it to be a substrate for RNAi-directed cleavage (i.e., cleavage through a RISC pathway).

[0157] One of skill in the art will also recognize that the duplex region is a primary functional portion of a dsRNA, e.g., a duplex region of about 19 to about 30 base pairs, e.g., about 19-30, 19-29, 19-28, 19-27, 19-26, 19-25, 19-24, 19-23, 19-22, 19-21, 19-20, 20-30, 20-29, 20-28, 20-27, 20-26, 20-25, 20-24,20-23, 20-22, 20-21, 21-30, 21-29, 21-28, 21-27, 21-26, 21-25, 21-24, 21-23, or 21-22 base pairs. Thus, in one embodiment, to the extent that it becomes processed to a functional duplex, of e.g., 15-30 base pairs, that targets a desired RNA for cleavage, an RNA molecule or complex of RNA molecules having a duplex region greater than 30 base pairs is a dsRNA. Thus, an ordinarily skilled artisan will recognize that in one embodiment, a miRNA is a dsRNA. In another embodiment, a dsRNA is not a naturally occurring miRNA. In another embodiment, an iRNA agent useful to target C9 gene expression is not generated in the target cell by cleavage of a larger dsRNA.

[0158] A dsRNA as described herein can further include one or more single-stranded nucleotide overhangs e.g., 1-4, 2-4, 1-3, 2-3, 1, 2, 3, or 4 nucleotides. dsRNAs having at least one nucleotide overhang can have superior inhibitory properties relative to their blunt-ended counterparts. A nucleotide overhang can comprise or consist of a nucleotide/nucleoside analog, including a deoxynucleotide/nucleoside. The overhang(s) can be on the sense strand, the antisense strand, or any combination thereof. Furthermore, the nucleotide(s) of an overhang can be present on the 5′-end, 3′-end, or both ends of an antisense or sense strand of a dsRNA.

[0159] A dsRNA can be synthesized by standard methods known in the art. Double stranded RNAi compounds of the invention may be prepared using a two-step procedure. First, the individual strands of the double stranded RNA molecule are prepared separately. Then, the component strands are annealed. The individual strands of the siRNA compound can be prepared using solution-phase or solid-phase organic synthesis or both. Organic synthesis offers the advantage that the oligonucleotide strands comprising unnatural or modified nucleotides can be easily prepared. Similarly, single-stranded oligonucleotides of the invention can be prepared using solution-phase or solid-phase organic synthesis or both.

[0160] In an aspect, a dsRNA of the invention includes at least two nucleotide sequences, a sense sequence and an anti-sense sequence. The sense strand is selected from the group of sequences provided in any one of Tables 2-3, and the corresponding antisense strand of the sense strand is selected from the group of sequences of any one of Tables 2-3. In this aspect, one of the two sequences is complementary to the other of the two sequences, with one of the sequences being substantially complementary to a sequence of an mRNA generated in the expression of a C9 gene. As such, in this aspect, a dsRNA will include two oligonucleotides, where one oligonucleotide is described as the sense strand in any one of Tables 2-3, and the second oligonucleotide is described as the corresponding antisense strand of the sense strand in any one of Tables 2-3.

[0161] In certain embodiments, the substantially complementary sequences of the dsRNA are contained on separate oligonucleotides. In other embodiments, the substantially complementary sequences of the dsRNA are contained on a single oligonucleotide.

[0162] In certain embodiments, the sense or antisense strand is selected from the sense or antisense strands in Tables 2-3.

[0163] It will be understood that, although the sequences in Table 2 are not described as modified or conjugated sequences, the RNA of the iRNA of the invention e.g., a dsRNA of the invention, may comprise any one of the sequences set forth in Table 2 that is un-modified, un-conjugated, or modified or conjugated differently than described therein. In other words, the invention encompasses dsRNA of Tables 2 which are un-modified, un-conjugated, modified, or conjugated, as described herein.

[0164] The skilled person is well aware that dsRNAs having a duplex structure of about 20 to 23 base pairs, e.g., 21, base pairs have been hailed as particularly effective in inducing RNA interference (Elbashir et al., EMBO 2001, 20:6877-6888). However, others have found that shorter or longer RNA duplex structures can also be effective (Chu and Rana (2007) RNA 14:1714-1719; Kim et al. (2005) Nat Biotech 23:222-226). In the embodiments described above, by virtue of the nature of the oligonucleotide sequences provided in any one of Tables 2-3, dsRNAs described herein can include at least one strand of a length of minimally 21 nucleotides. It can be reasonably expected that shorter duplexes having any one of the sequences in any one of Tables 2-3 minus only a few nucleotides on one or both ends can be similarly effective as compared to the dsRNAs described above. Hence, dsRNAs having a sequence of at least 19, 20, or more contiguous nucleotides derived from any one of the sequences of any one of Tables 2-3, and differing in their ability to inhibit the expression of a C9 gene by not more than about 5, 10, 15, 20, 25, or 30% inhibition from a dsRNA comprising the full sequence, are contemplated to be within the scope of the present invention.

[0165] In addition, the RNAs provided in Tables 2-3 identify a site(s) in a C9 transcript that is susceptible to RISC-mediated cleavage. As such, the present invention further features iRNAs that target within one of these sites. As used herein, an iRNA is said to target within a particular site of an RNA transcript if the iRNA promotes cleavage of the transcript anywhere within that particular site. Such an iRNA will generally include at least about 19 contiguous nucleotides from any one of the sequences provided in any one of Tables 2-3 coupled to additional nucleotide sequences taken from the region contiguous to the selected sequence in a C9 gene.

### III. Modified iRNAs of the Invention

[0166] In certain embodiments, the RNA of the iRNA of the invention e.g., a dsRNA, is un-modified, and does not comprise, e.g., chemical modifications or conjugations known in the art and described herein. In other embodiments, the RNA of an iRNA of the invention, e.g., a dsRNA, is chemically modified to enhance stability or other beneficial characteristics. In certain embodiments of the invention, substantially all of the nucleotides of an iRNA of the invention are modified. In other embodiments of the invention, all of the nucleotides of an iRNA or substantially all of the nucleotides of an iRNA are modified, i.e., not more than 5, 4, 3, 2, or 1 unmodified nucleotides are present in a strand of the iRNA.

[0167] The nucleic acids featured in the invention can be synthesized or modified by methods well established in the art, such as those described in “Current protocols in nucleic acid chemistry,” Beaucage, S. L. et al. (Edrs.), John Wiley & Sons, Inc., New York, NY, USA, which is hereby incorporated herein by reference. Modifications include, for example, end modifications, e.g., 5′-end modifications (phosphorylation, conjugation, inverted linkages) or 3′-end modifications (conjugation, DNA nucleotides, inverted linkages, etc.); base modifications, e.g., replacement with stabilizing bases, destabilizing bases, or bases that base pair with an expanded repertoire of partners, removal of bases (abasic nucleotides), or conjugated bases; sugar modifications (e.g., at the 2′-position or 4′-position) or replacement of the sugar; or backbone modifications, including modification or replacement of the phosphodiester linkages. Specific examples of iRNA compounds useful in the embodiments described herein include, but are not limited to RNAs containing modified backbones or no natural internucleoside linkages. RNAs having modified backbones include, among others, those that do not have a phosphorus atom in the backbone. For the purposes of this specification, and as sometimes referenced in the art, modified RNAs that do not have a phosphorus atom in their internucleoside backbone can also be considered to be oligonucleosides. In some embodiments, a modified iRNA will have a phosphorus atom in its internucleoside backbone.

[0168] Modified RNA backbones include, for example, phosphorothioates, chiral phosphorothioates, phosphorodithioates, phosphotriesters, aminoalkylphosphotriesters, methyl and other alkyl phosphonates including 3′-alkylene phosphonates and chiral phosphonates, phosphinates, phosphoramidates including 3′-amino phosphoramidate and aminoalkylphosphoramidates, thionophosphoramidates, thionoalkylphosphonates, thionoalkylphosphotriesters, and boranophosphates having normal 3′-5′ linkages, 2′-5′-linked analogs of these, and those having inverted polarity wherein the adjacent pairs of nucleoside units are linked 3′-5′ to 5′-3′ or 2′-5′ to 5′-2′. Various salts, mixed salts and free acid forms are also included. In some embodiments of the invention, the dsRNA agents of the invention are in a free acid form. In other embodiments of the invention, the dsRNA agents of the invention are in a salt form. In one embodiment, the dsRNA agents of the invention are in a sodium salt form. In certain embodiments, when the dsRNA agents of the invention are in the sodium salt form, sodium ions are present in the agent as counterions for substantially all of the phosphodiester and/or phosphorothiotate groups present in the agent. Agents in which substantially all of the phosphodiester and/or phosphorothioate linkages have a sodium counterion include not more than 5, 4, 3, 2, or 1 phosphodiester and/or phosphorothioate linkages without a sodium counterion. In some embodiments, when the dsRNA agents of the invention are in the sodium salt form, sodium ions are present in the agent as counterions for all of the phosphodiester and/or phosphorothiotate groups present in the agent.

[0169] Representative U.S. Patents that teach the preparation of the above phosphorus-containing linkages include, but are not limited to, U.S. Pat. Nos. 3,687,808; 4,469,863; 4,476,301; 5,023,243; 5,177,195; 5,188,897; 5,264,423; 5,276,019; 5,278,302; 5,286,717; 5,321,131; 5,399,676; 5,405,939; 5,453,496; 5,455,233; 5,466,677; 5,476,925; 5,519,126; 5,536,821; 5,541,316; 5,550,111; 5,563,253; 5,571,799; 5,587,361; 5,625,050; 6,028,188; 6,124,445; 6,160,109; 6,169,170; 6,172,209; 6,239,265; 6,277,603; 6,326,199; 6,346,614; 6,444,423; 6,531,590; 6,534,639; 6,608,035; 6,683,167; 6,858,715; 6,867,294; 6,878,805; 7,015,315; 7,041,816; 7,273,933; 7,321,029; and U.S. Pat. RE39464, the entire contents of each of which are hereby incorporated herein by reference.

[0170] Modified RNA backbones that do not include a phosphorus atom therein have backbones that are formed by short chain alkyl or cycloalkyl internucleoside linkages, mixed heteroatoms and alkyl or cycloalkyl internucleoside linkages, or one or more short chain heteroatomic or heterocyclic internucleoside linkages. These include those having morpholino linkages (formed in part from the sugar portion of a nucleoside); siloxane backbones; sulfide, sulfoxide and sulfone backbones; formacetyl and thioformacetyl backbones; methylene formacetyl and thioformacetyl backbones; alkene containing backbones; sulfamate backbones; methyleneimino and methylenehydrazino backbones; sulfonate and sulfonamide backbones; amide backbones; and others having mixed N, O, S, and CH₂ component parts.

[0171] Representative U.S. Patents that teach the preparation of the above oligonucleosides include, but are not limited to, U.S. Pat. Nos. 5,034,506; 5,166,315; 5,185,444; 5,214,134; 5,216,141; 5,235,033; 5,64,562; 5,264,564; 5,405,938; 5,434,257; 5,466,677; 5,470,967; 5,489,677; 5,541,307; 5,561,225; 5,596,086; 5,602,240; 5,608,046; 5,610,289; 5,618,704; 5,623,070; 5,663,312; 5,633,360; 5,677,437; and 5,677,439, the entire contents of each of which are hereby incorporated herein by reference.

[0172] Suitable RNA mimetics are contemplated for use in iRNAs provided herein, in which both the sugar and the internucleoside linkage, i.e., the backbone, of the nucleotide units are replaced with novel groups. The base units are maintained for hybridization with an appropriate nucleic acid target compound. One such oligomeric compound in which an RNA mimetic that has been shown to have excellent hybridization properties is referred to as a peptide nucleic acid (PNA). In PNA compounds, the sugar backbone of an RNA is replaced with an amide containing backbone, in particular an aminoethylglycine backbone. The nucleobases are retained and are bound directly or indirectly to aza nitrogen atoms of the amide portion of the backbone. Representative US patents that teach the preparation of PNA compounds include, but are not limited to, U.S. Pat. Nos. 5,539,082; 5,714,331; and 5,719,262, the entire contents of each of which are hereby incorporated herein by reference. Additional PNA compounds suitable for use in the iRNAs of the invention are described in, for example, in Nielsen et al., Science, 1991, 254, 1497-1500.

[0173] Some embodiments featured in the invention include RNAs with phosphorothioate backbones and oligonucleosides with heteroatom backbones, and in particular —CH₂—NH—CH₂—, —CH₂—N(CH₃)—O—CH₂—[known as a methylene (methylimino) or MMI backbone], —CH₂—O—N(CH₃)—CH₂—, —CH₂—N(CH₃)—N(CH₃)—CH₂— and —N(CH₃)—CH₂—CH₂—[wherein the native phosphodiester backbone is represented as —O—P—O—CH₂—] of the above-referenced U.S. Pat. No. 5,489,677, and the amide backbones of the above-referenced U.S. Pat. No. 5,602,240. In some embodiments, the RNAs featured herein have morpholino backbone structures of the above-referenced U.S. Pat. No. 5,034,506.

[0174] Modified RNAs can also contain one or more substituted sugar moieties. The iRNAs, e.g., dsRNAs, featured herein can include one of the following at the 2′-position: OH; F; O-, S-, or N-alkyl; O-, S-, or N-alkenyl; O-, S- or N-alkynyl; or O-alkyl-O-alkyl, wherein the alkyl, alkenyl and alkynyl can be substituted or unsubstituted C₁ to C₁₀ alkyl or C₂ to C₁₀ alkenyl and alkynyl. Exemplary suitable modifications include O[(CH₂)ₙO]ₘCH₃, O(CH₂)·ₙOCH₃, O(CH₂)ₙNH₂, O(CH₂)ₙCH₃, O(CH₂)ₙONH₂, and O(CH₂)ₙON[(CH₂)ₙCH₃)]₂, where n and m are from 1 to about 10. In other embodiments, dsRNAs include one of the following at the 2′ position: C₁ to C₁₀ lower alkyl, substituted lower alkyl, alkaryl, aralkyl, O-alkaryl or O-aralkyl, SH, SCH₃, OCN, Cl, Br, CN, CF₃, OCF₃, SOCH₃, SO₂CH₃, ONO₂, NO₂, N₃, NH₂, heterocycloalkyl, heterocycloalkaryl, aminoalkylamino, polyalkylamino, substituted silyl, an RNA cleaving group, a reporter group, an intercalator, a group for improving the pharmacokinetic properties of an iRNA, or a group for improving the pharmacodynamic properties of an iRNA, and other substituents having similar properties. In some embodiments, the modification includes a 2′-methoxyethoxy (2′-O—CH₂CH₂OCH₃, also known as 2′-O-(2-methoxyethyl) or 2′-MOE) (Martin et al., Helv. Chim. Acta, 1995, 78:486-504) i.e., an alkoxy-alkoxy group. Another exemplary modification is 2′-dimethylaminooxyethoxy, i.e., a O(CH₂)₂ON(CH₃)₂ group, also known as 2′-DMAOE, as described in examples herein below, and 2′-dimethylaminoethoxyethoxy (also known in the art as 2′-O-dimethylaminoethoxyethyl or 2′-DMAEOE), i.e., 2′-O—CH₂—O—CH₂—N(CH₂)₂. Further exemplary modifications include: 5′-Me-2′-F nucleotides, 5′-Me-2′-OMe nucleotides, 5′-Me-2′-deoxynucleotides, (both R and S isomers in these three families); 2′-alkoxyalkyl; and 2′-NMA (N-methylacetamide).

[0175] Other modifications include 2′-methoxy (2′-OCH₃), 2′-aminopropoxy (2′-OCH₂CH₂CH₂NH₂) and 2′-fluoro (2′-F). Similar modifications can also be made at other positions on the RNA of an iRNA, particularly the 3′ position of the sugar on the 3′ terminal nucleotide or in 2′-5′ linked dsRNAs and the 5′ position of 5′ terminal nucleotide. iRNAs can also have sugar mimetics such as cyclobutyl moieties in place of the pentofuranosyl sugar. Representative US patents that teach the preparation of such modified sugar structures include, but are not limited to, U.S. Pat. Nos. 4,981,957; 5,118,800; 5,319,080; 5,359,044; 5,393,878; 5,446,137; 5,466,786; 5,514,785; 5,519,134; 5,567,811; 5,576,427; 5,591,722; 5,597,909; 5,610,300; 5,627,053; 5,639,873; 5,646,265; 5,658,873; 5,670,633; and 5,700,920, certain of which are commonly owned with the instant application. The entire contents of each of the foregoing are hereby incorporated herein by reference.

[0176] An iRNA can also include nucleobase (often referred to in the art simply as “base”) modifications or substitutions. As used herein, “unmodified” or “natural” nucleobases include the purine bases adenine (A) and guanine (G), and the pyrimidine bases thymine (T), cytosine (C), and uracil (U). Modified nucleobases include other synthetic and natural nucleobases such as deoxy-thymine (dT), 5-methylcytosine (5-me-C), 5-hydroxymethyl cytosine, xanthine, hypoxanthine, 2-aminoadenine, 6-methyl and other alkyl derivatives of adenine and guanine, 2-propyl and other alkyl derivatives of adenine and guanine, 2-thiouracil, 2-thiothymine and 2-thiocytosine, 5-halouracil and cytosine, 5-propynyl uracil and cytosine, 6-azo uracil, cytosine and thymine, 5-uracil (pseudouracil), 4-thiouracil, 8-halo, 8-amino, 8-thiol, 8-thioalkyl, 8-hydroxyl anal other 8-substituted adenines and guanines, 5-halo, particularly 5-bromo, 5-trifluoromethyl and other 5-substituted uracils and cytosines, 7-methylguanine and 7-methyladenine, 8-azaguanine and 8-azaadenine, 7-deazaguanine and 7-daazaadenine and 3-deazaguanine and 3-deazaadenine. Further nucleobases include those disclosed in U.S. Pat. No. 3,687,808, those disclosed in Modified Nucleosides in Biochemistry, Biotechnology and Medicine, Herdewijn, P. ed. Wiley-VCH, 2008; those disclosed in The Concise Encyclopedia Of Polymer Science And Engineering, pages 858-859, Kroschwitz, J. L, ed. John Wiley & Sons, 1990, these disclosed by Englisch et al., Angewandte Chemie, International Edition, 1991, 30, 613, and those disclosed by Sanghvi, Y S., Chapter 15, dsRNA Research and Applications, pages 289-302, Crooke, S. T. and Lebleu, B., Ed., CRC Press, 1993. Certain of these nucleobases are particularly useful for increasing the binding affinity of the oligomeric compounds featured in the invention. These include 5-substituted pyrimidines, 6-azapyrimidines and N-2, N-6 and 0-6 substituted purines, including 2-aminopropyladenine, 5-propynyluracil and 5-propynylcytosine. 5-methylcytosine substitutions have been shown to increase nucleic acid duplex stability by 0.6-1.2° C. (Sanghvi, Y. S., Crooke, S. T. and Lebleu, B., Eds., dsRNA Research and Applications, CRC Press, Boca Raton, 1993, pp. 276-278) and are exemplary base substitutions, even more particularly when combined with 2′-O-methoxyethyl sugar modifications.

[0177] Representative U.S. Patents that teach the preparation of certain of the above noted modified nucleobases as well as other modified nucleobases include, but are not limited to, the above noted U.S. Pat. Nos. 3,687,808, 4,845,205; 5,130,30; 5,134,066; 5,175,273; 5,367,066; 5,432,272; 5,457,187; 5,459,255; 5,484,908; 5,502,177; 5,525,711; 5,552,540; 5,587,469; 5,594,121, 5,596,091; 5,614,617; 5,681,941; 5,750,692; 6,015,886; 6,147,200; 6,166,197; 6,222,025; 6,235,887; 6,380,368; 6,528,640; 6,639,062; 6,617,438; 7,045,610; 7,427,672; and 7,495,088, the entire contents of each of which are hereby incorporated herein by reference.

[0178] The RNA of an iRNA can also be modified to include one or more locked nucleic acids (LNA). A locked nucleic acid is a nucleotide having a modified ribose moiety in which the ribose moiety comprises an extra bridge connecting the 2′ and 4′ carbons. This structure effectively “locks” the ribose in the 3′-endo structural conformation. The addition of locked nucleic acids to siRNAs has been shown to increase siRNA stability in serum, and to reduce off-target effects (Elmen, J. et al., (2005) Nucleic Acids Research 33(1):439-447; Mook, O R. et al., (2007) Mol Canc Ther 6(3):833-843; Grunweller, A. et al., (2003) Nucleic Acids Research 31(12):3185-3193).

[0179] In some embodiments, the RNA of an iRNA can also be modified to include one or more bicyclic sugar moieties. A “bicyclic sugar” is a furanosyl ring modified by the bridging of two atoms. A “bicyclic nucleoside” (“BNA”) is a nucleoside having a sugar moiety comprising a bridge connecting two carbon atoms of the sugar ring, thereby forming a bicyclic ring system. In certain embodiments, the bridge connects the 4′-carbon and the 2′-carbon of the sugar ring. Thus, in some embodiments an agent of the invention may include one or more locked nucleic acids (LNA). A locked nucleic acid is a nucleotide having a modified ribose moiety in which the ribose moiety comprises an extra bridge connecting the 2′ and 4′ carbons. In other words, an LNA is a nucleotide comprising a bicyclic sugar moiety comprising a 4′-CH₂—O-2′ bridge. This structure effectively “locks” the ribose in the 3′-endo structural conformation. The addition of locked nucleic acids to siRNAs has been shown to increase siRNA stability in serum, and to reduce off-target effects (Elmen, J. et al., (2005) Nucleic Acids Research 33(1):439-447; Mook, O R. et al., (2007) Mol Canc Ther 6(3):833-843; Grunweller, A. et al., (2003) Nucleic Acids Research 31(12):3185-3193). Examples of bicyclic nucleosides for use in the polynucleotides of the invention include without limitation nucleosides comprising a bridge between the 4′ and the 2′ ribosyl ring atoms. In certain embodiments, the antisense polynucleotide agents of the invention include one or more bicyclic nucleosides comprising a 4′ to 2′ bridge. Examples of such 4′ to 2′ bridged bicyclic nucleosides, include but are not limited to 4′-(CH₂)—O-2′ (LNA); 4′-(CH₂)—S-2′; 4′-(CH₂)₂—O-2′ (ENA); 4′-CH(CH₃)—O-2′ (also referred to as “constrained ethyl” or “cEt”) and 4′-CH(CH₂OCH₃)—O-2′ (and analogs thereof; see, e.g., U.S. Pat. No. 7,399,845); 4′-C(CH₃)(CH₃)—O-2′ (and analogs thereof; see e.g., U.S. Pat. No. 8,278,283); 4′-CH₂—N(OCH₃)-2′ (and analogs thereof; see e.g., U.S. Pat. No. 8,278,425); 4′-CH₂—O—N(CH₃)-2′ (see, e.g., U.S. Patent Publication No. 2004/0171570); 4′-CH₂—N(R)—O-2′, wherein R is H, C1-C12 alkyl, or a protecting group (see, e.g., U.S. Pat. No. 7,427,672); 4′-CH₂—C(H)(CH₃)-2′ (see, e.g., Chattopadhyaya et al., J. Org. Chem., 2009, 74, 118-134); and 4′-CH₂—C(═CH₂)-2′ (and analogs thereof; see, e.g., U.S. Pat. No. 8,278,426). The entire contents of each of the foregoing are hereby incorporated herein by reference.

[0180] Additional representative U.S. Patents and U.S. Patent Publications that teach the preparation of locked nucleic acid nucleotides include, but are not limited to, the following: U.S. Pat. Nos. 6,268,490; 6,525,191; 6,670,461; 6,770,748; 6,794,499; 6,998,484; 7,053,207; 7,034,133;7,084,125; 7,399,845; 7,427,672; 7,569,686; 7,741,457; 8,022,193; 8,030,467; 8,278,425; 8,278,426; 8,278,283; US 2008/0039618; and US 2009/0012281, the entire contents of each of which are hereby incorporated herein by reference.

[0181] Any of the foregoing bicyclic nucleosides can be prepared having one or more stereochemical sugar configurations including for example a-L-ribofuranose and P-D-ribofuranose (see WO 99/14226).

[0182] The RNA of an iRNA can also be modified to include one or more constrained ethyl nucleotides. As used herein, a “constrained ethyl nucleotide” or “cEt” is a locked nucleic acid comprising a bicyclic sugar moiety comprising a 4′-CH(CH₃)—O-2′ bridge. In one embodiment, a constrained ethyl nucleotide is in the S conformation referred to herein as “S-cEt.”

[0183] An iRNA of the invention may also include one or more “conformationally restricted nucleotides” (“CRN”). CRN are nucleotide analogs with a linker connecting the C2′ and C4′ carbons of ribose or the C3 and -C5′ carbons of ribose. CRN lock the ribose ring into a stable conformation and increase the hybridization affinity to mRNA. The linker is of sufficient length to place the oxygen in an optimal position for stability and affinity resulting in less ribose ring puckering.

[0184] Representative publications that teach the preparation of certain of the above noted CRN include, but are not limited to, U.S. Patent Publication No. 2013/0190383; and PCT publication WO 2013/036868, the entire contents of each of which are hereby incorporated herein by reference.

[0185] In some embodiments, an iRNA of the invention comprises one or more monomers that are UNA (unlocked nucleic acid) nucleotides. UNA is unlocked acyclic nucleic acid, wherein any of the bonds of the sugar has been removed, forming an unlocked “sugar” residue. In one example, UNA also encompasses monomer with bonds between C1′-C4′ have been removed (i.e. the covalent carbon-oxygen-carbon bond between the C1′ and C4′ carbons). In another example, the C2′-C3′ bond (i.e. the covalent carbon-carbon bond between the C2′ and C3′ carbons) of the sugar has been removed (see Nuc. Acids Symp. Series, 52, 133-134 (2008) and Fluiter et al., Mol. Biosyst., 2009, 10, 1039 hereby incorporated by reference).

[0186] Representative U.S. publications that teach the preparation of UNA include, but are not limited to, U.S. Pat. No. 8,314,227; and U.S. Patent Publication Nos. 2013/0096289; 2013/0011922; and 2011/0313020, the entire contents of each of which are hereby incorporated herein by reference.

[0187] Potentially stabilizing modifications to the ends of RNA molecules can include N-(acetylaminocaproyl)-4-hydroxyprolinol (Hyp-C6-NHAc), N-(caproyl-4-hydroxyprolinol (Hyp-C6), N-(acetyl-4-hydroxyprolinol (Hyp-NHAc), thymidine-2′-O-deoxythymidine (ether), N-(aminocaproyl)-4-hydroxyprolinol (Hyp-C6-amino), 2-docosanoyl-uridine-3″-phosphate, inverted base dT(idT) and others. Disclosure of this modification can be found in PCT Publication No. WO 2011/005861.

[0188] Other modifications of the nucleotides of an iRNA of the invention include a 5′ phosphate or 5′ phosphate mimic, e.g., a 5′-terminal phosphate or phosphate mimic on the antisense strand of an iRNA. Suitable phosphate mimics are disclosed in, for example U.S. Patent Publication No. 2012/0157511, the entire contents of which are incorporated herein by reference.

[0189] A. Modified iRNAs Comprising Motifs of the Invention

[0190] In certain aspects of the invention, the double stranded RNA agents of the invention include agents with chemical modifications as disclosed, for example, in WO2013/075035, the entire contents of each of which are incorporated herein by reference. WO2013/075035 provides motifs of three identical modifications on three consecutive nucleotides into a sense strand or antisense strand of a dsRNAi agent, particularly at or near the cleavage site. In some embodiments, the sense strand and antisense strand of the dsRNAi agent may otherwise be completely modified. The introduction of these motifs interrupts the modification pattern, if present, of the sense or antisense strand. The dsRNAi agent may be optionally conjugated with a GalNAc derivative ligand, for instance on the sense strand.

[0191] More specifically, when the sense strand and antisense strand of the double stranded RNA agent are completely modified to have one or more motifs of three identical modifications on three consecutive nucleotides at or near the cleavage site of at least one strand of a dsRNAi agent, the gene silencing activity of the dsRNAi agent was observed.

[0192] Accordingly, the invention provides double stranded RNA agents capable of inhibiting the expression of a target gene (i.e., C9 gene) in vivo. The RNAi agent comprises a sense strand and an antisense strand. Each strand of the RNAi agent may be, for example, 17-30 nucleotides in length, 25-30 nucleotides in length, 27-30 nucleotides in length, 19-25 nucleotides in length, 19-23 nucleotides in length, 19-21 nucleotides in length, 21-25 nucleotides in length, or 21-23 nucleotides in length.

[0193] The sense strand and antisense strand typically form a duplex double stranded RNA (“dsRNA”), also referred to herein as “dsRNAi agent.” The duplex region of a dsRNAi agent may be, for example, the duplex region can be 27-30 nucleotide pairs in length, 19-25 nucleotide pairs in length, 19-23 nucleotide pairs in length, 19-21 nucleotide pairs in length, 21-25 nucleotide pairs in length, or 21-23 nucleotide pairs in length. In another example, the duplex region is selected from 19, 20, 21, 22, 23, 24, 25, 26, and 27 nucleotides in length.

[0194] In certain embodiments, the dsRNAi agent may contain one or more overhang regions or capping groups at the 3′-end, 5′-end, or both ends of one or both strands. The overhang can be, independently, 1-6 nucleotides in length, for instance 2-6 nucleotides in length, 1-5 nucleotides in length, 2-5 nucleotides in length, 1-4 nucleotides in length, 2-4 nucleotides in length, 1-3 nucleotides in length, 2-3 nucleotides in length, or 1-2 nucleotides in length. In certain embodiments, the overhang regions can include extended overhang regions as provided above. The overhangs can be the result of one strand being longer than the other, or the result of two strands of the same length being staggered. The overhang can form a mismatch with the target mRNA or it can be complementary to the gene sequences being targeted or can be another sequence. The first and second strands can also be joined, e.g., by additional bases to form a hairpin, or by other non-base linkers.

[0195] In certain embodiments, the nucleotides in the overhang region of the dsRNAi agent can each independently be a modified or unmodified nucleotide including, but no limited to 2′-sugar modified, such as, 2′-F, 2′-O-methyl, thymidine (T), 2′-O-methoxyethyl-5-methyluridine (Teo), 2′-O-methoxyethyladenosine (Aeo), 2′-O-methoxyethyl-5-methylcytidine (m5Ceo), and any combinations thereof.

[0196] For example, TT can be an overhang sequence for either end on either strand. The overhang can form a mismatch with the target mRNA or it can be complementary to the gene sequences being targeted or can be another sequence.

[0197] The 5′- or 3′-overhangs at the sense strand, antisense strand, or both strands of the dsRNAi agent may be phosphorylated. In some embodiments, the overhang region(s) contains two nucleotides having a phosphorothioate between the two nucleotides, where the two nucleotides can be the same or different. In some embodiments, the overhang is present at the 3′-end of the sense strand, antisense strand, or both strands. In some embodiments, this 3′-overhang is present in the antisense strand. In some embodiments, this 3′-overhang is present in the sense strand.

[0198] The dsRNAi agent may contain only a single overhang, which can strengthen the interference activity of the RNAi, without affecting its overall stability. For example, the single-stranded overhang may be located at the 3′-end of the sense strand or, alternatively, at the 3-end of the antisense strand. The RNAi may also have a blunt end, located at the 5′-end of the antisense strand (or the 3′-end of the sense strand) or vice versa. Generally, the antisense strand of the dsRNAi agent has a nucleotide overhang at the 3′-end, and the 5′-end is blunt. While not wishing to be bound by theory, the asymmetric blunt end at the 5′-end of the antisense strand and 3′-end overhang of the antisense strand favor the guide strand loading into RISC process.

[0199] In certain embodiments, the dsRNAi agent is a double ended bluntmer of 19 nucleotides in length, wherein the sense strand contains at least one motif of three 2′-F modifications on three consecutive nucleotides at positions 7, 8, 9 from the 5′end. The antisense strand contains at least one motif of three 2′-O-methyl modifications on three consecutive nucleotides at positions 11, 12, 13 from the 5′end.

[0200] In other embodiments, the dsRNAi agent is a double ended bluntmer of 20 nucleotides in length, wherein the sense strand contains at least one motif of three 2′-F modifications on three consecutive nucleotides at positions 8, 9, 10 from the 5′end. The antisense strand contains at least one motif of three 2′-O-methyl modifications on three consecutive nucleotides at positions 11, 12, 13 from the 5′end.

[0201] In yet other embodiments, the dsRNAi agent is a double ended bluntmer of 21 nucleotides in length, wherein the sense strand contains at least one motif of three 2′-F modifications on three consecutive nucleotides at positions 9, 10, 11 from the 5′end. The antisense strand contains at least one motif of three 2′-O-methyl modifications on three consecutive nucleotides at positions 11, 12, 13 from the 5′end.

[0202] In certain embodiments, the dsRNAi agent comprises a 21 nucleotide sense strand and a 23 nucleotide antisense strand, wherein the sense strand contains at least one motif of three 2′-F modifications on three consecutive nucleotides at positions 9, 10, 11 from the 5′end; the antisense strand contains at least one motif of three 2′-O-methyl modifications on three consecutive nucleotides at positions 11, 12, 13 from the 5′end, wherein one end of the RNAi agent is blunt, while the other end comprises a 2 nucleotide overhang. Preferably, the 2 nucleotide overhang is at the 3′-end of the antisense strand.

[0203] When the 2 nucleotide overhang is at the 3′-end of the antisense strand, there may be two phosphorothioate internucleotide linkages between the terminal three nucleotides, wherein two of the three nucleotides are the overhang nucleotides, and the third nucleotide is a paired nucleotide next to the overhang nucleotide. In one embodiment, the RNAi agent additionally has two phosphorothioate internucleotide linkages between the terminal three nucleotides at both the 5′-end of the sense strand and at the 5′-end of the antisense strand. In certain embodiments, every nucleotide in the sense strand and the antisense strand of the dsRNAi agent, including the nucleotides that are part of the motifs are modified nucleotides. In certain embodiments each residue is independently modified with a 2′-O-methyl or 3′-fluoro, e.g., in an alternating motif. Optionally, the dsRNAi agent further comprises a ligand (preferably GalNAc₃).

[0204] In certain embodiments, the dsRNAi agent comprises a sense and an antisense strand, wherein the sense strand is 25-30 nucleotide residues in length, wherein starting from the 5′ terminal nucleotide (position 1) positions 1 to 23 of the first strand comprise at least 8 ribonucleotides; the antisense strand is 36-66 nucleotide residues in length and, starting from the 3′ terminal nucleotide, comprises at least 8 ribonucleotides in the positions paired with positions 1-23 of sense strand to form a duplex; wherein at least the 3′ terminal nucleotide of antisense strand is unpaired with sense strand, and up to 6 consecutive 3′ terminal nucleotides are unpaired with sense strand, thereby forming a 3′ single stranded overhang of 1-6 nucleotides; wherein the 5′ terminus of antisense strand comprises from 10-30 consecutive nucleotides which are unpaired with sense strand, thereby forming a 10-30 nucleotide single stranded 5′ overhang; wherein at least the sense strand 5′ terminal and 3′ terminal nucleotides are base paired with nucleotides of antisense strand when sense and antisense strands are aligned for maximum complementarity, thereby forming a substantially duplexed region between sense and antisense strands; and antisense strand is sufficiently complementary to a target RNA along at least 19 ribonucleotides of antisense strand length to reduce target gene expression when the double stranded nucleic acid is introduced into a mammalian cell; and wherein the sense strand contains at least one motif of three 2′-F modifications on three consecutive nucleotides, where at least one of the motifs occurs at or near the cleavage site. The antisense strand contains at least one motif of three 2′-O-methyl modifications on three consecutive nucleotides at or near the cleavage site.

[0205] In certain embodiments, the dsRNAi agent comprises sense and antisense strands, wherein the dsRNAi agent comprises a first strand having a length which is at least 25 and at most 29 nucleotides and a second strand having a length which is at most 30 nucleotides with at least one motif of three 2′-O-methyl modifications on three consecutive nucleotides at position 11, 12, 13 from the 5′ end; wherein the 3′ end of the first strand and the 5′ end of the second strand form a blunt end and the second strand is 1-4 nucleotides longer at its 3′ end than the first strand, wherein the duplex region which is at least 25 nucleotides in length, and the second strand is sufficiently complementary to a target mRNA along at least 19 nucleotide of the second strand length to reduce target gene expression when the RNAi agent is introduced into a mammalian cell, and wherein Dicer cleavage of the dsRNAi agent preferentially results in an siRNA comprising the 3′-end of the second strand, thereby reducing expression of the target gene in the mammal. Optionally, the dsRNAi agent further comprises a ligand.

[0206] In certain embodiments, the sense strand of the dsRNAi agent contains at least one motif of three identical modifications on three consecutive nucleotides, where one of the motifs occurs at the cleavage site in the sense strand.

[0207] In certain embodiments, the antisense strand of the dsRNAi agent can also contain at least one motif of three identical modifications on three consecutive nucleotides, where one of the motifs occurs at or near the cleavage site in the antisense strand.

[0208] For a dsRNAi agent having a duplex region of 19-23 nucleotides in length, the cleavage site of the antisense strand is typically around the 10, 11, and 12 positions from the 5′-end. Thus the motifs of three identical modifications may occur at the 9, 10, 11 positions; the 10, 11, 12 positions; the 11, 12, 13 positions; the 12, 13, 14 positions; or the 13, 14, 15 positions of the antisense strand, the count starting from the first nucleotide from the 5′-end of the antisense strand, or, the count starting from the first paired nucleotide within the duplex region from the 5′-end of the antisense strand. The cleavage site in the antisense strand may also change according to the length of the duplex region of the dsRNAi agent from the 5′-end.

[0209] The sense strand of the dsRNAi agent may contain at least one motif of three identical modifications on three consecutive nucleotides at the cleavage site of the strand; and the antisense strand may have at least one motif of three identical modifications on three consecutive nucleotides at or near the cleavage site of the strand. When the sense strand and the antisense strand form a dsRNA duplex, the sense strand and the antisense strand can be so aligned that one motif of the three nucleotides on the sense strand and one motif of the three nucleotides on the antisense strand have at least one nucleotide overlap, i.e., at least one of the three nucleotides of the motif in the sense strand forms a base pair with at least one of the three nucleotides of the motif in the antisense strand. Alternatively, at least two nucleotides may overlap, or all three nucleotides may overlap.

[0210] In some embodiments, the sense strand of the dsRNAi agent may contain more than one motif of three identical modifications on three consecutive nucleotides. The first motif may occur at or near the cleavage site of the strand and the other motifs may be a wing modification. The term “wing modification” herein refers to a motif occurring at another portion of the strand that is separated from the motif at or near the cleavage site of the same strand. The wing modification is either adjacent to the first motif or is separated by at least one or more nucleotides. When the motifs are immediately adjacent to each other then the chemistries of the motifs are distinct from each other, and when the motifs are separated by one or more nucleotide than the chemistries can be the same or different. Two or more wing modifications may be present. For instance, when two wing modifications are present, each wing modification may occur at one end relative to the first motif which is at or near cleavage site or on either side of the lead motif.

[0211] Like the sense strand, the antisense strand of the dsRNAi agent may contain more than one motifs of three identical modifications on three consecutive nucleotides, with at least one of the motifs occurring at or near the cleavage site of the strand. This antisense strand may also contain one or more wing modifications in an alignment similar to the wing modifications that may be present on the sense strand.

[0212] In some embodiments, the wing modification on the sense strand or antisense strand of the dsRNAi agent typically does not include the first one or two terminal nucleotides at the 3′-end, 5′-end, or both ends of the strand.

[0213] In other embodiments, the wing modification on the sense strand or antisense strand of the dsRNAi agent typically does not include the first one or two paired nucleotides within the duplex region at the 3′-end, 5′-end, or both ends of the strand.

[0214] When the sense strand and the antisense strand of the dsRNAi agent each contain at least one wing modification, the wing modifications may fall on the same end of the duplex region, and have an overlap of one, two, or three nucleotides.

[0215] When the sense strand and the antisense strand of the dsRNAi agent each contain at least two wing modifications, the sense strand and the antisense strand can be so aligned that two modifications each from one strand fall on one end of the duplex region, having an overlap of one, two, or three nucleotides; two modifications each from one strand fall on the other end of the duplex region, having an overlap of one, two or three nucleotides; two modifications one strand fall on each side of the lead motif, having an overlap of one, two or three nucleotides in the duplex region.

[0216] In some embodiments, every nucleotide in the sense strand and antisense strand of the dsRNAi agent, including the nucleotides that are part of the motifs, may be modified. Each nucleotide may be modified with the same or different modification which can include one or more alteration of one or both of the non-linking phosphate oxygens or of one or more of the linking phosphate oxygens; alteration of a constituent of the ribose sugar, e.g., of the 2′-hydroxyl on the ribose sugar; wholesale replacement of the phosphate moiety with “dephospho” linkers; modification or replacement of a naturally occurring base; and replacement or modification of the ribose-phosphate backbone.

[0217] As nucleic acids are polymers of subunits, many of the modifications occur at a position which is repeated within a nucleic acid, e.g., a modification of a base, or a phosphate moiety, or a non-linking O of a phosphate moiety. In some cases the modification will occur at all of the subject positions in the nucleic acid but in many cases it will not. By way of example, a modification may only occur at a 3′- or 5′ terminal position, may only occur in a terminal region, e.g., at a position on a terminal nucleotide or in the last 2, 3, 4, 5, or 10 nucleotides of a strand. A modification may occur in a double strand region, a single strand region, or in both. A modification may occur only in the double strand region of an RNA or may only occur in a single strand region of a RNA. For example, a phosphorothioate modification at a non-linking O position may only occur at one or both termini, may only occur in a terminal region, e.g., at a position on a terminal nucleotide or in the last 2, 3, 4, 5, or 10 nucleotides of a strand, or may occur in double strand and single strand regions, particularly at termini. The 5′-end or ends can be phosphorylated.

[0218] It may be possible, e.g., to enhance stability, to include particular bases in overhangs, or to include modified nucleotides or nucleotide surrogates, in single strand overhangs, e.g., in a 5′- or 3′-overhang, or in both. For example, it can be desirable to include purine nucleotides in overhangs. In some embodiments all or some of the bases in a 3′- or 5′-overhang may be modified, e.g., with a modification described herein. Modifications can include, e.g., the use of modifications at the 2′ position of the ribose sugar with modifications that are known in the art, e.g., the use of deoxyribonucleotides, 2′-deoxy-2′-fluoro (2′-F) or 2′-O-methyl modified instead of the ribosugar of the nucleobase, and modifications in the phosphate group, e.g., phosphorothioate modifications. Overhangs need not be homologous with the target sequence.

[0219] In some embodiments, each residue of the sense strand and antisense strand is independently modified with LNA, CRN, cET, UNA, HNA, CeNA, 2′-methoxyethyl, 2′-O-methyl, 2′-O-allyl, 2′-C-allyl, 2′-deoxy, 2′-hydroxyl, or 2′-fluoro. The strands can contain more than one modification. In one embodiment, each residue of the sense strand and antisense strand is independently modified with 2′-O-methyl or 2′-fluoro.

[0220] At least two different modifications are typically present on the sense strand and antisense strand. Those two modifications may be the 2′-O-methyl or 2′-fluoro modifications, or others.

[0221] In certain embodiments, the Nₐ or N_{b} comprise modifications of an alternating pattern. The term “alternating motif” as used herein refers to a motif having one or more modifications, each modification occurring on alternating nucleotides of one strand. The alternating nucleotide may refer to one per every other nucleotide or one per every three nucleotides, or a similar pattern. For example, if A, B and C each represent one type of modification to the nucleotide, the alternating motif can be “ABABABABABAB . . . ,” “AABBAABBAABB . . . ,” “AABAABAABAAB . . . ,” “AAABAAABAAAB . . . ,” “AAABBBAAABBB . . . ,” or “ABCABCABCABC . . . ,” etc.

[0222] The type of modifications contained in the alternating motif may be the same or different. For example, if A, B, C, D each represent one type of modification on the nucleotide, the alternating pattern, i.e., modifications on every other nucleotide, may be the same, but each of the sense strand or antisense strand can be selected from several possibilities of modifications within the alternating motif such as “ABABAB . . . ”, “ACACAC . . . ” “BDBDBD . . . ” or “CDCDCD . . . ,” etc.

[0223] In some embodiments, the dsRNAi agent of the invention comprises the modification pattern for the alternating motif on the sense strand relative to the modification pattern for the alternating motif on the antisense strand is shifted. The shift may be such that the modified group of nucleotides of the sense strand corresponds to a differently modified group of nucleotides of the antisense strand and vice versa. For example, the sense strand when paired with the antisense strand in the dsRNA duplex, the alternating motif in the sense strand may start with “ABABAB” from 5′ to 3′ of the strand and the alternating motif in the antisense strand may start with “BABABA” from 5′ to 3′ of the strand within the duplex region. As another example, the alternating motif in the sense strand may start with “AABBAABB” from 5′ to 3′ of the strand and the alternating motif in the antisense strand may start with “BBAABBAA” from 5′ to 3′ of the strand within the duplex region, so that there is a complete or partial shift of the modification patterns between the sense strand and the antisense strand.

[0224] In some embodiments, the dsRNAi agent comprises the pattern of the alternating motif of 2′-O-methyl modification and 2′-F modification on the sense strand initially has a shift relative to the pattern of the alternating motif of 2′-O-methyl modification and 2′-F modification on the antisense strand initially, i.e., the 2′-O-methyl modified nucleotide on the sense strand base pairs with a 2′-F modified nucleotide on the antisense strand and vice versa. The 1 position of the sense strand may start with the 2′-F modification, and the 1 position of the antisense strand may start with the 2′-O-methyl modification.

[0225] The introduction of one or more motifs of three identical modifications on three consecutive nucleotides to the sense strand or antisense strand interrupts the initial modification pattern present in the sense strand or antisense strand. This interruption of the modification pattern of the sense or antisense strand by introducing one or more motifs of three identical modifications on three consecutive nucleotides to the sense or antisense strand may enhance the gene silencing activity against the target gene.

[0226] In some embodiments, when the motif of three identical modifications on three consecutive nucleotides is introduced to any of the strands, the modification of the nucleotide next to the motif is a different modification than the modification of the motif. For example, the portion of the sequence containing the motif is “ . . . NₐYYYN_{b} . . . ,” where “Y” represents the modification of the motif of three identical modifications on three consecutive nucleotide, and “Nₐ” and “N_{b}” represent a modification to the nucleotide next to the motif “YYY” that is different than the modification of Y, and where Nₐ and N_{b} can be the same or different modifications. Alternatively, Nₐ or N_{b} may be present or absent when there is a wing modification present.

[0227] The iRNA may further comprise at least one phosphorothioate or methylphosphonate internucleotide linkage. The phosphorothioate or methylphosphonate internucleotide linkage modification may occur on any nucleotide of the sense strand, antisense strand, or both strands in any position of the strand. For instance, the internucleotide linkage modification may occur on every nucleotide on the sense strand or antisense strand; each internucleotide linkage modification may occur in an alternating pattern on the sense strand or antisense strand; or the sense strand or antisense strand may contain both internucleotide linkage modifications in an alternating pattern. The alternating pattern of the internucleotide linkage modification on the sense strand may be the same or different from the antisense strand, and the alternating pattern of the internucleotide linkage modification on the sense strand may have a shift relative to the alternating pattern of the internucleotide linkage modification on the antisense strand. In one embodiment, a double-stranded RNAi agent comprises 6-8 phosphorothioate internucleotide linkages. In some embodiments, the antisense strand comprises two phosphorothioate internucleotide linkages at the 5′-end and two phosphorothioate internucleotide linkages at the 3′-end, and the sense strand comprises at least two phosphorothioate internucleotide linkages at either the 5′-end or the 3′-end.

[0228] In some embodiments, the dsRNAi agent comprises a phosphorothioate or methylphosphonate internucleotide linkage modification in the overhang region. For example, the overhang region may contain two nucleotides having a phosphorothioate or methylphosphonate internucleotide linkage between the two nucleotides. Internucleotide linkage modifications also may be made to link the overhang nucleotides with the terminal paired nucleotides within the duplex region. For example, at least 2, 3, 4, or all the overhang nucleotides may be linked through phosphorothioate or methylphosphonate internucleotide linkage, and optionally, there may be additional phosphorothioate or methylphosphonate internucleotide linkages linking the overhang nucleotide with a paired nucleotide that is next to the overhang nucleotide. For instance, there may be at least two phosphorothioate internucleotide linkages between the terminal three nucleotides, in which two of the three nucleotides are overhang nucleotides, and the third is a paired nucleotide next to the overhang nucleotide. These terminal three nucleotides may be at the 3′-end of the antisense strand, the 3′-end of the sense strand, the 5′-end of the antisense strand, or the 5′end of the antisense strand.

[0229] In some embodiments, the 2-nucleotide overhang is at the 3′-end of the antisense strand, and there are two phosphorothioate internucleotide linkages between the terminal three nucleotides, wherein two of the three nucleotides are the overhang nucleotides, and the third nucleotide is a paired nucleotide next to the overhang nucleotide. Optionally, the dsRNAi agent may additionally have two phosphorothioate internucleotide linkages between the terminal three nucleotides at both the 5′-end of the sense strand and at the 5′-end of the antisense strand.

[0230] In one embodiment, the dsRNAi agent comprises mismatch(es) with the target, within the duplex, or combinations thereof. The mismatch may occur in the overhang region or the duplex region. The base pair may be ranked on the basis of their propensity to promote dissociation or melting (e.g., on the free energy of association or dissociation of a particular pairing, the simplest approach is to examine the pairs on an individual pair basis, though next neighbor or similar analysis can also be used). In terms of promoting dissociation: A:U is preferred over G:C; G:U is preferred over G:C; and I:C is preferred over G:C (I=inosine). Mismatches, e.g., non-canonical or other than canonical pairings (as described elsewhere herein) are preferred over canonical (A:T, A:U, G:C) pairings; and pairings which include a universal base are preferred over canonical pairings.

[0231] In certain embodiments, the dsRNAi agent comprises at least one of the first 1, 2, 3, 4, or 5 base pairs within the duplex regions from the 5′-end of the antisense strand independently selected from the group of: A:U, G:U, I:C, and mismatched pairs, e.g., non-canonical or other than canonical pairings or pairings which include a universal base, to promote the dissociation of the antisense strand at the 5′-end of the duplex.

[0232] In certain embodiments, the nucleotide at the 1 position within the duplex region from the 5′-end in the antisense strand is selected from A, dA, dU, U, and dT. Alternatively, at least one of the first 1, 2, or 3 base pair within the duplex region from the 5′-end of the antisense strand is an AU base pair. For example, the first base pair within the duplex region from the 5′-end of the antisense strand is an AU base pair.

[0233] In other embodiments, the nucleotide at the 3′-end of the sense strand is deoxy-thymine (dT) or the nucleotide at the 3′-end of the antisense strand is deoxy-thymine (dT). For example, there is a short sequence of deoxy-thymine nucleotides, for example, two dT nucleotides on the 3′-end of the sense, antisense strand, or both strands.

[0234] In certain embodiments, the sense strand sequence may be represented by formula (I):

5′nₚ-Nₐ-(X X X)ᵢ-N_{b}-Y Y Y-N_{b}-(Z Z Z)ⱼ-Nₐ-n_{q} 3′ (I)
[0235] wherein:
[0236] i and j are each independently 0 or 1;
[0237] p and q are each independently 0-6;
[0238] each Nₐ independently represents an oligonucleotide sequence comprising 0-25 modified nucleotides, each sequence comprising at least two differently modified nucleotides;
[0239] each N_{b} independently represents an oligonucleotide sequence comprising 0-10 modified nucleotides;
[0240] each nₚ and n_{q} independently represent an overhang nucleotide;
[0241] wherein Nb and Y do not have the same modification; and
[0242] XXX, YYY, and ZZZ each independently represent one motif of three identical modifications on three consecutive nucleotides. Preferably YYY is all 2′-F modified nucleotides.

[0243] In some embodiments, the Nₐ or N_{b} comprises modifications of alternating pattern.

[0244] In some embodiments, the YYY motif occurs at or near the cleavage site of the sense strand. For example, when the dsRNAi agent has a duplex region of 17-23 nucleotides in length, the YYY motif can occur at or the vicinity of the cleavage site (e.g.: can occur at positions 6, 7, 8; 7, 8, 9; 8, 9, 10; 9, 10, 11; 10, 11,12; or 11, 12, 13) of the sense strand, the count starting from the first nucleotide, from the 5′-end; or optionally, the count starting at the first paired nucleotide within the duplex region, from the 5′-end.

[0245] In one embodiment, i is 1 and j is 0, or i is 0 and j is 1, or both i and j are 1. The sense strand can therefore be represented by the following formulas:

5′nₚ-Nₐ-YYY-N_{b}-ZZZ-Nₐ-n_{q} 3′ (Ib);

5′ nₚ-Nₐ-XXX-N_{b}-YYY-Nₐ-n_{q} 3′ (Ic); or

5′ nₚ-Nₐ-XXX-N_{b}-YYY-N_{b}-ZZZ-Nₐ-n_{q} 3′ (Id).

[0246] When the sense strand is represented by formula (Ib), N_{b} represents an oligonucleotide sequence comprising 0-10, 0-7, 0-5, 0-4, 0-2, or 0 modified nucleotides. Each Nₐ independently can represent an oligonucleotide sequence comprising 2-20, 2-15, or 2-10 modified nucleotides.

[0247] When the sense strand is represented as formula (Ic), N_{b} represents an oligonucleotide sequence comprising 0-10, 0-7, 0-10, 0-7, 0-5, 0-4, 0-2, or 0 modified nucleotides. Each Nₐ can independently represent an oligonucleotide sequence comprising 2-20, 2-15, or 2-10 modified nucleotides.

[0248] When the sense strand is represented as formula (Id), each N_{b} independently represents an oligonucleotide sequence comprising 0-10, 0-7, 0-5, 0-4, 0-2, or 0 modified nucleotides. Preferably, N_{b} is 0, 1, 2, 3, 4, 5, or 6 Each Nₐ can independently represent an oligonucleotide sequence comprising 2-20, 2-15, or 2-10 modified nucleotides.

[0249] Each of X, Y and Z may be the same or different from each other.

[0250] In other embodiments, i is 0 and j is 0, and the sense strand may be represented by the formula:

5′ nₚ-Nₐ-YYY-Nₐ-n_{q} 3′ (Ia).

[0251] When the sense strand is represented by formula (Ia), each Nₐ independently can represent an oligonucleotide sequence comprising 2-20, 2-15, or 2-10 modified nucleotides.

[0252] In one embodiment, the antisense strand sequence of the RNAi may be represented by formula (II):

5′ n_{q′}-Nₐ′-(Z′Z′Z′)ₖ-N_{b}′-Y′Y′Y′-N_{b}′-(X′X′X′)₁-N′ₐ-nₚ′ 3′ (II)
[0253] wherein:
[0254] k and l are each independently 0 or 1;
[0255] p′ and q′ are each independently 0-6;
[0256] each Nₐ′ independently represents an oligonucleotide sequence comprising 0-25 modified nucleotides, each sequence comprising at least two differently modified nucleotides;
[0257] each N_{b}′ independently represents an oligonucleotide sequence comprising 0-10 modified nucleotides;
[0258] each nₚ′ and n_{q}′ independently represent an overhang nucleotide;
[0259] wherein N_{b}′ and Y′ do not have the same modification; and
[0260] X′X′X′, Y′Y′Y′, and Z′Z′Z′ each independently represent one motif of three identical modifications on three consecutive nucleotides.

[0261] In some embodiments, the Nₐ′ or N_{b}′ comprises modifications of alternating pattern.

[0262] The Y′Y′Y′ motif occurs at or near the cleavage site of the antisense strand. For example, when the dsRNAi agent has a duplex region of 17-23 nucleotides in length, the Y′Y′Y′ motif can occur at positions 9, 10, 11; 10, 11, 12; 11, 12, 13; 12, 13, 14; or 13, 14, 15 of the antisense strand, with the count starting from the first nucleotide, from the 5′-end; or optionally, the count starting at the first paired nucleotide within the duplex region, from the 5′-end. Preferably, the Y′Y′Y′ motif occurs at positions 11, 12, 13.

[0263] In certain embodiments, Y′Y′Y′ motif is all 2′-OMe modified nucleotides.

[0264] In certain embodiments, k is 1 and 1 is 0, or k is 0 and 1 is 1, or both k and 1 are 1.

[0265] The antisense strand can therefore be represented by the following formulas:

5′ n_{q′}-Nₐ′-Z′Z′Z′-N_{b}′-Y′Y′Y′-Nₐ′-n_{p′} 3′ (IIb);

5′ n_{q′}-Nₐ′-Y′Y′Y′-N_{b}′-X′X′X′-n_{p′} 3′ (IIc); or

5′ n_{q′}-Nₐ′-Z′Z′Z′-N_{b}′-Y′Y′Y′-N_{b}′-X′X′X′-Nₐ′-n_{p′}3′ (IId).

[0266] When the antisense strand is represented by formula (IIb), N_{b}′ represents an oligonucleotide sequence comprising 0-10, 0-7, 0-10, 0-7, 0-5, 0-4, 0-2, or 0 modified nucleotides. Each Nₐ′ independently represents an oligonucleotide sequence comprising 2-20, 2-15, or 2-10 modified nucleotides.

[0267] When the antisense strand is represented as formula (IIc), N_{b}′ represents an oligonucleotide sequence comprising 0-10, 0-7, 0-10, 0-7, 0-5, 0-4, 0-2, or 0 modified nucleotides. Each Nₐ′ independently represents an oligonucleotide sequence comprising 2-20, 2-15, or 2-10 modified nucleotides.

[0268] When the antisense strand is represented as formula (IId), each N_{b}′ independently represents an oligonucleotide sequence comprising 0-10, 0-7, 0-10, 0-7, 0-5, 0-4, 0-2, or 0 modified nucleotides. Each Nₐ′ independently represents an oligonucleotide sequence comprising 2-20, 2-15, or 2-10 modified nucleotides. Preferably, N_{b} is 0, 1, 2, 3, 4, 5, or 6.

[0269] In other embodiments, k is 0 and 1 is 0 and the antisense strand may be represented by the formula:

5′ n_{p′}-N_{a′}-Y′Y′Y′-N_{a′}-n_{q′} 3′ (Ia).

[0270] When the antisense strand is represented as formula (IIa), each Nₐ′ independently represents an oligonucleotide sequence comprising 2-20, 2-15, or 2-10 modified nucleotides. Each of X′, Y′ and Z′ may be the same or different from each other.

[0271] Each nucleotide of the sense strand and antisense strand may be independently modified with LNA, CRN, UNA, cEt, HNA, CeNA, 2′-methoxyethyl, 2′-O-methyl, 2′-O-allyl, 2′-C-allyl, 2′-hydroxyl, or 2′-fluoro. For example, each nucleotide of the sense strand and antisense strand is independently modified with 2′-O-methyl or 2′-fluoro. Each X, Y, Z, X′, Y′, and Z′, in particular, may represent a 2′-O-methyl modification or a 2′-fluoro modification.

[0272] In some embodiments, the sense strand of the dsRNAi agent may contain YYY motif occurring at 9, 10, and 11 positions of the strand when the duplex region is 21 nt, the count starting from the first nucleotide from the 5′-end, or optionally, the count starting at the first paired nucleotide within the duplex region, from the 5′-end; and Y represents 2′-F modification. The sense strand may additionally contain XXX motif or ZZZ motifs as wing modifications at the opposite end of the duplex region; and XXX and ZZZ each independently represents a 2′-OMe modification or 2′-F modification.

[0273] In some embodiments the antisense strand may contain Y′Y′Y′ motif occurring at positions 11, 12, 13 of the strand, the count starting from the first nucleotide from the 5′-end, or optionally, the count starting at the first paired nucleotide within the duplex region, from the 5′-end; and Y′ represents 2′-O-methyl modification. The antisense strand may additionally contain X′X′X′ motif or Z′Z′Z′ motifs as wing modifications at the opposite end of the duplex region; and X′X′X′ and Z′Z′Z′ each independently represents a 2′-OMe modification or 2′-F modification.

[0274] The sense strand represented by any one of the above formulas (Ia), (Ib), (Ic), and (Id) forms a duplex with an antisense strand being represented by any one of formulas (IIa), (IIb), (IIc), and (IId), respectively.

[0275] Accordingly, the dsRNAi agents for use in the methods of the invention may comprise a sense strand and an antisense strand, each strand having 14 to 30 nucleotides, the iRNA duplex represented by formula (III):

sense: 5′ nₚ-Nₐ-(X X X)ᵢ-N_{b}-Y Y Y-N_{b}-(Z Z Z)ⱼ-Nₐ-n_{q} 3′

antisense: 3′ nₚ′-Nₐ′-(X′X′X′)ₖ-N_{b}′-Y′Y′Y′-N_{b}′-(Z′Z′Z′)ₗ-Nₐ′-n_{q}′ 5′ (III)
[0276] wherein:
[0277] i, j, k, and l are each independently 0 or 1;
[0278] p, p′, q, and q′ are each independently 0-6;
[0279] each Nₐ and Nₐ′ independently represents an oligonucleotide sequence comprising 0-25 modified nucleotides, each sequence comprising at least two differently modified nucleotides;
[0280] each N_{b} and N_{b}′ independently represents an oligonucleotide sequence comprising 0-10 modified nucleotides;
[0281] wherein each nₚ′, nₚ, n_{q}′, and n_{q}, each of which may or may not be present, independently represents an overhang nucleotide; and
[0282] XXX, YYY, ZZZ, X′X′X′, Y′Y′Y′, and Z′Z′Z′ each independently represent one motif of three identical modifications on three consecutive nucleotides.

[0283] In one embodiment, i is 0 and j is 0; or i is 1 and j is 0; or i is 0 and j is 1; or both i and j are 0; or both i and j are 1. In another embodiment, k is 0 and 1 is 0; or k is 1 and 1 is 0; k is 0 and 1 is 1; or both k and 1 are 0; or both k and 1 are 1.

[0284] Exemplary combinations of the sense strand and antisense strand forming an iRNA duplex include the formulas below:

5′ nₚ-Nₐ-Y Y Y-Nₐ-n_{q} 3′

3′ nₚ′-Nₐ′-Y′Y′Y′-Nₐ′n_{q}′5′ (IIIa)

5′ nₚ-Nₐ-Y Y Y-N_{b}-Z Z Z-Nₐ-n_{q} 3′

3′ nₚ′-Nₐ′-Y′Y′Y′-N_{b}′-Z′Z′Z′-Nₐ′n_{q}′ 5′ (IIIb)

5′ nₚ-Nₐ-X X X-N_{b}-Y Y Y-Nₐ-n_{q} 3′

3′ nₚ′-Nₐ′-X′X′X′-N_{b}′-Y′Y′Y′-Nₐ′-n_{q}′5′ (IIIc)

5′ nₚ-Nₐ-X X X-N_{b}-Y Y Y-N_{b}-Z Z Z-Nₐ-n_{q} 3′

3′ nₚ′-Nₐ′-X′X′X′-N_{b}′-Y′Y′Y′-N_{b}′-Z′Z′Z′-Nₐ-n_{q}′5′ (IIId)

[0285] When the dsRNAi agent is represented by formula (IIIa), each Nₐ independently represents an oligonucleotide sequence comprising 2-20, 2-15, or 2-10 modified nucleotides.

[0286] When the dsRNAi agent is represented by formula (IIIb), each N_{b} independently represents an oligonucleotide sequence comprising 1-10, 1-7, 1-5, or 1-4 modified nucleotides. Each Nₐ independently represents an oligonucleotide sequence comprising 2-20, 2-15, or 2-10 modified nucleotides.

[0287] When the dsRNAi agent is represented as formula (IIc), each N_{b}, N_{b}′ independently represents an oligonucleotide sequence comprising 0-10, 0-7, 0-10, 0-7, 0-5, 0-4, 0-2, or 0 modified nucleotides. Each Nₐ independently represents an oligonucleotide sequence comprising 2-20, 2-15, or 2-10 modified nucleotides.

[0288] When the dsRNAi agent is represented as formula (IIId), each N_{b}, N_{b}′ independently represents an oligonucleotide sequence comprising 0-10, 0-7, 0-10, 0-7, 0-5, 0-4, 0-2, or 0 modified nucleotides. Each Nₐ, Nₐ′ independently represents an oligonucleotide sequence comprising 2-20, 2-15, or 2-10 modified nucleotides. Each of Nₐ, Nₐ′, N_{b}, and N_{b}′ independently comprises modifications of alternating pattern.

[0289] Each of X, Y, and Z in formulas (III), (IIIa), (IIb), (IIIc), and (IIId) may be the same or different from each other.

[0290] When the dsRNAi agent is represented by formula (III), (IIIa), (IIb), (IIIc), and (IIId), at least one of the Y nucleotides may form a base pair with one of the Y′ nucleotides. Alternatively, at least two of the Y nucleotides form base pairs with the corresponding Y′ nucleotides; or all three of the Y nucleotides all form base pairs with the corresponding Y′ nucleotides.

[0291] When the dsRNAi agent is represented by formula (IIIb) or (IIId), at least one of the Z nucleotides may form a base pair with one of the Z′ nucleotides. Alternatively, at least two of the Z nucleotides form base pairs with the corresponding Z′ nucleotides; or all three of the Z nucleotides all form base pairs with the corresponding Z′ nucleotides.

[0292] When the dsRNAi agent is represented as formula (IIIc) or (IIId), at least one of the X nucleotides may form a base pair with one of the X′ nucleotides. Alternatively, at least two of the X nucleotides form base pairs with the corresponding X′ nucleotides; or all three of the X nucleotides all form base pairs with the corresponding X′ nucleotides.

[0293] In certain embodiments, the modification on the Y nucleotide is different than the modification on the Y′ nucleotide, the modification on the Z nucleotide is different than the modification on the Z′ nucleotide, or the modification on the X nucleotide is different than the modification on the X′ nucleotide.

[0294] In certain embodiments, when the dsRNAi agent is represented by formula (IIId), the Nₐ modifications are 2′-O-methyl or 2′-fluoro modifications. In other embodiments, when the RNAi agent is represented by formula (IIId), the Nₐ modifications are 2′-O-methyl or 2′-fluoro modifications and nₚ′>0 and at least one nₚ′ is linked to a neighboring nucleotide a via phosphorothioate linkage. In yet other embodiments, when the RNAi agent is represented by formula (IIId), the Nₐ modifications are 2′-O-methyl or 2′-fluoro modifications, nₚ′>0 and at least one nₚ′ is linked to a neighboring nucleotide via phosphorothioate linkage, and the sense strand is conjugated to one or more GalNAc derivatives attached through a bivalent or trivalent branched linker (described below). In other embodiments, when the RNAi agent is represented by formula (IIId), the Nₐ modifications are 2′-O-methyl or 2′-fluoro modifications, nₚ′>0 and at least one nₚ′ is linked to a neighboring nucleotide via phosphorothioate linkage, the sense strand comprises at least one phosphorothioate linkage, and the sense strand is conjugated to one or more GalNAc derivatives attached through a bivalent or trivalent branched linker.

[0295] In some embodiments, when the dsRNAi agent is represented by formula (IIIa), the Nₐ modifications are 2′-O-methyl or 2′-fluoro modifications, nₚ′>0 and at least one nₚ′ is linked to a neighboring nucleotide via phosphorothioate linkage, the sense strand comprises at least one phosphorothioate linkage, and the sense strand is conjugated to one or more GalNAc derivatives attached through a bivalent or trivalent branched linker.

[0296] In some embodiments, the dsRNAi agent is a multimer containing at least two duplexes represented by formula (III), (IIIa), (IIIb), (IIc), and (IIId), wherein the duplexes are connected by a linker. The linker can be cleavable or non-cleavable. Optionally, the multimer further comprises a ligand. Each of the duplexes can target the same gene or two different genes; or each of the duplexes can target same gene at two different target sites.

[0297] In some embodiments, the dsRNAi agent is a multimer containing three, four, five, six, or more duplexes represented by formula (III), (IIIa), (IIb), (IIc), and (IIId), wherein the duplexes are connected by a linker. The linker can be cleavable or non-cleavable. Optionally, the multimer further comprises a ligand. Each of the duplexes can target the same gene or two different genes; or each of the duplexes can target same gene at two different target sites.

[0298] In one embodiment, two dsRNAi agents represented by at least one of formulas (III), (IIIa), (IIb), (IIc), and (IIId) are linked to each other at the 5′ end, and one or both of the 3′ ends, and are optionally conjugated to a ligand. Each of the agents can target the same gene or two different genes; or each of the agents can target same gene at two different target sites.

[0299] In certain embodiments, an RNAi agent of the invention may contain a low number of nucleotides containing a 2′-fluoro modification, e.g., 10 or fewer nucleotides with 2′-fluoro modification. For example, the RNAi agent may contain 10, 9, 8, 7, 6, 5, 4, 3, 2, 1 or 0 nucleotides with a 2′-fluoro modification. In a specific embodiment, the RNAi agent of the invention contains 10 nucleotides with a 2′-fluoro modification, e.g., 4 nucleotides with a 2′-fluoro modification in the sense strand and 6 nucleotides with a 2′-fluoro modification in the antisense strand. In another specific embodiment, the RNAi agent of the invention contains 6 nucleotides with a 2′-fluoro modification, e.g., 4 nucleotides with a 2′-fluoro modification in the sense strand and 2 nucleotides with a 2′-fluoro modification in the antisense strand.

[0300] In other embodiments, an RNAi agent of the invention may contain an ultra low number of nucleotides containing a 2′-fluoro modification, e.g., 2 or fewer nucleotides containing a 2′-fluoro modification. For example, the RNAi agent may contain 2, 1 of 0 nucleotides with a 2′-fluoro modification. In a specific embodiment, the RNAi agent may contain 2 nucleotides with a 2′-fluoro modification, e.g., 0 nucleotides with a 2-fluoro modification in the sense strand and 2 nucleotides with a 2′-fluoro modification in the antisense strand.

[0301] Various publications describe multimeric iRNAs that can be used in the methods of the invention. Such publications include WO2007/091269, U.S. Pat. No. 7,858,769, WO2010/141511, WO2007/117686, WO2009/014887, and WO2011/031520 the entire contents of each of which are hereby incorporated herein by reference.

[0302] In certain embodiments, the compositions and methods of the disclosure include a vinyl phosphonate (VP) modification of an RNAi agent as described herein. In exemplary embodiments, a vinyl phosphonate of the disclosure has the following structure:

[chemical structure]

A vinyl phosphonate of the instant disclosure may be attached to either the antisense or the sense strand of a dsRNA of the disclosure. In certain preferred embodiments, a vinyl phosphonate of the instant disclosure is attached to the antisense strand of a dsRNA, optionally at the 5′ end of the antisense strand of the dsRNA.

[0303] Vinyl phosphonate modifications are also contemplated for the compositions and methods of the instant disclosure. An exemplary vinyl phosphonate structure is:

[chemical structure]

[0304] As described in more detail below, the iRNA that contains conjugations of one or more carbohydrate moieties to an iRNA can optimize one or more properties of the iRNA. In many cases, the carbohydrate moiety will be attached to a modified subunit of the iRNA. For example, the ribose sugar of one or more ribonucleotide subunits of a iRNA can be replaced with another moiety, e.g., a non-carbohydrate (preferably cyclic) carrier to which is attached a carbohydrate ligand. A ribonucleotide subunit in which the ribose sugar of the subunit has been so replaced is referred to herein as a ribose replacement modification subunit (RRMS). A cyclic carrier may be a carbocyclic ring system, i.e., all ring atoms are carbon atoms, or a heterocyclic ring system, i.e., one or more ring atoms may be a heteroatom, e.g., nitrogen, oxygen, sulfur. The cyclic carrier may be a monocyclic ring system, or may contain two or more rings, e.g. fused rings. The cyclic carrier may be a fully saturated ring system, or it may contain one or more double bonds.

[0305] The ligand may be attached to the polynucleotide via a carrier. The carriers include (i) at least one “backbone attachment point,” preferably two “backbone attachment points” and (ii) at least one “tethering attachment point.” A “backbone attachment point” as used herein refers to a functional group, e.g. a hydroxyl group, or generally, a bond available for, and that is suitable for incorporation of the carrier into the backbone, e.g., the phosphate, or modified phosphate, e.g., sulfur containing, backbone, of a ribonucleic acid. A “tethering attachment point” (TAP) in some embodiments refers to a constituent ring atom of the cyclic carrier, e.g., a carbon atom or a heteroatom (distinct from an atom which provides a backbone attachment point), that connects a selected moiety. The moiety can be, e.g., a carbohydrate, e.g. monosaccharide, disaccharide, trisaccharide, tetrasaccharide, oligosaccharide, or polysaccharide. Optionally, the selected moiety is connected by an intervening tether to the cyclic carrier. Thus, the cyclic carrier will often include a functional group, e.g., an amino group, or generally, provide a bond, that is suitable for incorporation or tethering of another chemical entity, e.g., a ligand to the constituent ring.

[0306] The iRNA may be conjugated to a ligand via a carrier, wherein the carrier can be cyclic group or acyclic group; preferably, the cyclic group is selected from pyrrolidinyl, pyrazolinyl, pyrazolidinyl, imidazolinyl, imidazolidinyl, piperidinyl, piperazinyl, [1,3]dioxolane, oxazolidinyl, isoxazolidinyl, morpholinyl, thiazolidinyl, isothiazolidinyl, quinoxalinyl, pyridazinonyl, tetrahydrofuryl, and decalin; preferably, the acyclic group is a serinol backbone or diethanolamine backbone.

[0307] i. Thermally Destabilizing Modifications

[0308] In certain embodiments, a dsRNA molecule can be optimized for RNA interference by incorporating thermally destabilizing modifications in the seed region of the antisense strand (i.e., at positions 2-9 of the 5′-end of the antisense strand or at positions 2-8 of the 5′-end of the refrenced strand) to reduce or inhibit off-target gene silencing. It has been discovered that dsRNAs with an antisense strand comprising at least one thermally destabilizing modification of the duplex within the first 9 nucleotide positions, counting from the 5′ end, of the antisense strand have reduced off-target gene silencing activity. Accordingly, in some embodiments, the antisense strand comprises at least one (e.g., one, two, three, four, five or more) thermally destabilizing modification of the duplex within the first 9 nucleotide positions of the 5′ region of the antisense strand. In some embodiments, one or more thermally destabilizing modification(s) of the duplex is/are located in positions 2-9, or preferably positions 4-8, from the 5′-end of the antisense strand. In some further embodiments, the thermally destabilizing modification(s) of the duplex is/are located at position 6, 7 or 8 from the 5′-end of the antisense strand. In still some further embodiments, the thermally destabilizing modification of the duplex is located at position 7 from the 5′-end of the antisense strand. The term “thermally destabilizing modification(s)” includes modification(s) that would result with a dsRNA with a lower overall melting temperature (Tm) (preferably a Tm with one, two, three or four degrees lower than the Tm of the dsRNA without having such modification(s). In some embodiments, the thermally destabilizing modification of the duplex is located at position 2, 3, 4, 5 or 9 from the 5′-end of the antisense strand.

[0309] An iRNA agent comprises a sense strand and an antisense strand, each strand having 14 to 40 nucleotides. The RNAi agent may be represented by formula (L):

[chemical structure]

In formula (L), B1, B2, B3, B1′, B2′, B3′, and B4′ each are independently a nucleotide containing a modification selected from the group consisting of 2′-O-alkyl, 2′-substituted alkoxy, 2′-substituted alkyl, 2′-halo, ENA, and BNA/LNA. In one embodiment, B1, B2, B3, B1′, B2′, B3′, and B4′ each contain 2′-OMe modifications. In one embodiment, B1, B2, B3, B1′, B2′, B3′, and B4′ each contain 2′-OMe or 2′-F modifications. In one embodiment, at least one of B1, B2, B3, B1′, B2′, B3′, and B4′ contain 2′-O-N-methylacetamido (2′-O-NMA) modification.

[0310] C1 is a thermally destabilizing nucleotide placed at a site opposite to the seed region of the antisense strand (i.e., at positions 2-8 of the 5′-end of the antisense strand, or at positions 2-9 of the 5′-end of the referenced strand). For example, C1 is at a position of the sense strand that pairs with a nucleotide at positions 2-8 of the 5′-end of the antisense strand. In one example, C1 is at position 15 from the 5′-end of the sense strand. C1 nucleotide bears the thermally destabilizing modification which can include abasic modification; mismatch with the opposing nucleotide in the duplex; and sugar modification such as 2′-deoxy modification or acyclic nucleotide e.g., unlocked nucleic acids (UNA) or glycerol nucleic acid (GNA). In one embodiment, C1 has thermally destabilizing modification selected from the group consisting of: i) mismatch with the opposing nucleotide in the antisense strand; ii) abasic modification selected from the group consisting of:

[chemical structure]

and iii) sugar modification selected from the group consisting of:

[chemical structure]

wherein B is a modified or unmodified nucleobase, R¹ and R² independently are H, halogen, OR₃, or alkyl; and R₃ is H, alkyl, cycloalkyl, aryl, aralkyl, heteroaryl or sugar. In one embodiment, the thermally destabilizing modification in C1 is a mismatch selected from the group consisting of G:G, G:A, G:U, G:T, A:A, A:C, C:C, C:U, C:T, U:U, T:T, and U:T; and optionally, at least one nucleobase in the mismatch pair is a 2′-deoxy nucleobase. In one example, the thermally destabilizing modification in C1 is GNA or

[chemical structure]

[0311] T1, T1′, T2′, and T3′ each independently represent a nucleotide comprising a modification providing the nucleotide a steric bulk that is less or equal to the steric bulk of a 2′-OMe modification. A steric bulk refers to the sum of steric effects of a modification. Methods for determining steric effects of a modification of a nucleotide are known to one skilled in the art. The modification can be at the 2′ position of a ribose sugar of the nucleotide, or a modification to a non-ribose nucleotide, acyclic nucleotide, or the backbone of the nucleotide that is similar or equivalent to the 2′ position of the ribose sugar, and provides the nucleotide a steric bulk that is less than or equal to the steric bulk of a 2′-OMe modification. For example, T1, T1′, T2′, and T3′ are each independently selected from DNA, RNA, LNA, 2′-F, and 2′-F-5′-methyl. In one embodiment, T1 is DNA. In one embodiment, T1′ is DNA, RNA or LNA. In one embodiment, T2′ is DNA or RNA. In one embodiment, T3′ is DNA or RNA.
[0312] n¹, n³, and q¹ are independently 4 to 15 nucleotides in length.
[0313] n⁵, q³, and q⁷ are independently 1-6 nucleotide(s) in length.
[0314] n⁴, q², and q⁶ are independently 1-3 nucleotide(s) in length; alternatively, n⁴ is 0.
[0315] q⁵ is independently 0-10 nucleotide(s) in length.
[0316] n² and q⁴ are independently 0-3 nucleotide(s) in length.

[0317] Alternatively, n⁴ is 0-3 nucleotide(s) in length.

[0318] In one embodiment, n⁴ can be 0. In one example, n⁴ is 0, and q² and q⁶ are 1. In another example, n⁴ is 0, and q² and q⁶ are 1, with two phosphorothioate internucleotide linkage modifications within position 1-5 of the sense strand (counting from the 5′-end of the sense strand), and two phosphorothioate internucleotide linkage modifications at positions 1 and 2 and two phosphorothioate internucleotide linkage modifications within positions 18-23 of the antisense strand (counting from the 5′-end of the antisense strand).

[0319] In one embodiment, n⁴, q², and q⁶ are each 1.

[0320] In one embodiment, n², n⁴, q², q⁴, and q⁶ are each 1.

[0321] In one embodiment, C1 is at position 14-17 of the 5′-end of the sense strand, when the sense strand is 19-22 nucleotides in length, and n⁴ is 1. In one embodiment, C1 is at position 15 of the 5′-end of the sense strand

[0322] In one embodiment, T3′ starts at position 2 from the 5′ end of the antisense strand. In one example, T3′ is at position 2 from the 5′ end of the antisense strand and q⁶ is equal to 1.

[0323] In one embodiment, T1′ starts at position 14 from the 5′ end of the antisense strand. In one example, T1′ is at position 14 from the 5′ end of the antisense strand and q² is equal to 1.

[0324] In an exemplary embodiment, T3′ starts from position 2 from the 5′ end of the antisense strand and T1′ starts from position 14 from the 5′ end of the antisense strand. In one example, T3′ starts from position 2 from the 5′ end of the antisense strand and q⁶ is equal to 1 and T1′ starts from position 14 from the 5′ end of the antisense strand and q² is equal to 1.

[0325] In one embodiment, T1′ and T3′ are separated by 11 nucleotides in length (i.e. not counting the T1′ and T3′ nucleotides).

[0326] In one embodiment, T1′ is at position 14 from the 5′ end of the antisense strand. In one example, T1′ is at position 14 from the 5′ end of the antisense strand and q² is equal to 1, and the modification at the 2′ position or positions in a non-ribose, acyclic or backbone that provide less steric bulk than a 2′-OMe ribose.

[0327] In one embodiment, T3′ is at position 2 from the 5′ end of the antisense strand. In one example, T3′ is at position 2 from the 5′ end of the antisense strand and q⁶ is equal to 1, and the modification at the 2′ position or positions in a non-ribose, acyclic or backbone that provide less than or equal to steric bulk than a 2′-OMe ribose.

[0328] In one embodiment, T1 is at the cleavage site of the sense strand. In one example, T1 is at position 11 from the 5′ end of the sense strand, when the sense strand is 19-22 nucleotides in length, and n² is 1. In an exemplary embodiment, T1 is at the cleavage site of the sense strand at position 11 from the 5′ end of the sense strand, when the sense strand is 19-22 nucleotides in length, and n² is 1,

[0329] In one embodiment, T2′ starts at position 6 from the 5′ end of the antisense strand. In one example, T2′ is at positions 6-10 from the 5′ end of the antisense strand, and q⁴ is 1.

[0330] In an exemplary embodiment, T1 is at the cleavage site of the sense strand, for instance, at position 11 from the 5′ end of the sense strand, when the sense strand is 19-22 nucleotides in length, and n² is 1; T1′ is at position 14 from the 5′ end of the antisense strand, and q² is equal to 1, and the modification to T1′ is at the 2′ position of a ribose sugar or at positions in a non-ribose, acyclic or backbone that provide less steric bulk than a 2′-OMe ribose; T2′ is at positions 6-10 from the 5′ end of the antisense strand, and q⁴ is 1; and T3′ is at position 2 from the 5′ end of the antisense strand, and q⁶ is equal to 1, and the modification to T3′ is at the 2′ position or at positions in a non-ribose, acyclic or backbone that provide less than or equal to steric bulk than a 2′-OMe ribose.

[0331] In one embodiment, T2′ starts at position 8 from the 5′ end of the antisense strand. In one example, T2′ starts at position 8 from the 5′ end of the antisense strand, and q⁴ is 2.

[0332] In one embodiment, T2′ starts at position 9 from the 5′ end of the antisense strand. In one example, T2′ is at position 9 from the 5′ end of the antisense strand, and q⁴ is 1.

[0333] In one embodiment, B1′ is 2′-OMe or 2′-F, q¹ is 9, T1′ is 2′-F, q² is 1, B2′ is 2′-OMe or 2′-F, q³ is 4, T2′ is 2′-F, q⁴ is 1, B3′ is 2′-OMe or 2′-F, q⁵ is 6, T3′ is 2′-F, q⁶ is 1, B4′ is 2′-OMe, and q⁷ is 1; with two phosphorothioate internucleotide linkage modifications within positions 1-5 of the sense strand (counting from the 5′-end of the sense strand), and two phosphorothioate internucleotide linkage modifications at positions 1 and 2 and two phosphorothioate internucleotide linkage modifications within positions 18-23 of the antisense strand (counting from the 5′-end of the antisense strand).

[0334] In one embodiment, n⁴ is 0, B3 is 2′-OMe, n⁵ is 3, B1′ is 2′-OMe or 2′-F, q¹ is 9, T1′ is 2′-F, q² is 1, B2′ is 2′-OMe or 2′-F, q³ is 4, T2′ is 2′-F, q⁴ is 1, B3′ is 2′-OMe or 2′-F, q⁵ is 6, T3′ is 2′-F, q⁶ is 1, B4′ is 2′-OMe, and q⁷ is 1; with two phosphorothioate internucleotide linkage modifications within positions 1-5 of the sense strand (counting from the 5′-end of the sense strand), and two phosphorothioate internucleotide linkage modifications at positions 1 and 2 and two phosphorothioate internucleotide linkage modifications within positions 18-23 of the antisense strand (counting from the 5′-end of the antisense strand).

[0335] In one embodiment, B1 is 2′-OMe or 2′-F, n¹ is 8, T1 is 2′F, n² is 3, B2 is 2′-OMe, n³ is 7, n⁴ is 0, B3 is 2′OMe, n⁵ is 3, B1′ is 2′-OMe or 2′-F, q¹ is 9, T1′ is 2′-F, q² is 1, B2′ is 2′-OMe or 2′-F, q³ is 4, T2′ is 2′-F, q⁴ is 2, B3′ is 2′-OMe or 2′-F, q⁵ is 5, T3′ is 2′-F, q⁶ is 1, B4′ is 2′-OMe, and q⁷ is 1.

[0336] In one embodiment, B1 is 2′-OMe or 2′-F, n¹ is 8, T1 is 2′F, n² is 3, B2 is 2′-OMe, n³ is 7, n⁴ is 0, B3 is 2′-OMe, n⁵ is 3, B1′ is 2′-OMe or 2′-F, q¹ is 9, T1′ is 2′-F, q² is 1, B2′ is 2′-OMe or 2′-F, q³ is 4, T2′ is 2′-F, q⁴ is 2, B3′ is 2′-OMe or 2′-F, q⁵ is 5, T3′ is 2′-F, q⁶ is 1, B4′ is 2′-OMe, and q⁷ is 1; with two phosphorothioate internucleotide linkage modifications within positions 1-5 of the sense strand (counting from the 5′-end of the sense strand), and two phosphorothioate internucleotide linkage modifications at positions 1 and 2 and two phosphorothioate internucleotide linkage modifications within positions 18-23 of the antisense strand (counting from the 5′-end of the antisense strand).

[0337] In one embodiment, B1 is 2′-OMe or 2′-F, n¹ is 6, T1 is 2′F, n² is 3, B2 is 2′-OMe, n³ is 7, n⁴ is 0, B3 is 2′OMe, n⁵ is 3, B1′ is 2′-OMe or 2′-F, q¹ is 7, T1′ is 2′-F, q² is 1, B2′ is 2′-OMe or 2′-F, q³ is 4, T2′ is 2′-F, q⁴ is 2, B3′ is 2′-OMe or 2′-F, q⁵ is 5, T3′ is 2′-F, q⁶ is 1, B4′ is 2′-OMe, and q⁷ is 1.

In one embodiment, B1 is 2′-OMe or 2′-F, n¹ is 6, T1 is 2′F, n² is 3, B2 is 2′-OMe, n³ is 7, n⁴ is 0, B3 is 2′-OMe, n⁵ is 3, B1′ is 2′-OMe or 2′-F, q¹ is 7, T1′ is 2′-F, q² is 1, B2′ is 2′-OMe or 2′-F, q³ is 4, T2′ is 2′-F, q⁴ is 2, B3′ is 2′-OMe or 2′-F, q⁵ is 5, T3′ is 2′-F, q⁶ is 1, B4′ is 2′-OMe, and q⁷ is 1; with two phosphorothioate internucleotide linkage modifications within positions 1-5 of the sense strand (counting from the 5′-end of the sense strand), and two phosphorothioate internucleotide linkage modifications at positions 1 and 2 and two phosphorothioate internucleotide linkage modifications within positions 18-23 of the antisense strand (counting from the 5′-end of the antisense strand).

[0338] In one embodiment, B1 is 2′-OMe or 2′-F, n¹ is 8, T1 is 2′F, n² is 3, B2 is 2′-OMe, n³ is 7, n⁴ is 0, B3 is 2′OMe, n⁵ is 3, B1′ is 2′-OMe or 2′-F, q¹ is 9, T1′ is 2′-F, q² is 1, B2′ is 2′-OMe or 2′-F, q³ is 4, T2′ is 2′-F, q⁴ is 1, B3′ is 2′-OMe or 2′-F, q⁵ is 6, T3′ is 2′-F, q⁶ is 1, B4′ is 2′-OMe, and q⁷ is 1.

In one embodiment, B1 is 2′-OMe or 2′-F, n¹ is 8, T1 is 2′F, n² is 3, B2 is 2′-OMe, n³ is 7, n⁴ is 0, B3 is 2′-OMe, n⁵ is 3, B1′ is 2′-OMe or 2′-F, q¹ is 9, T1′ is 2′-F, q² is 1, B2′ is 2′-OMe or 2′-F, q³ is 4, T2′ is 2′-F, q⁴ is 1, B3′ is 2′-OMe or 2′-F, q⁵ is 6, T3′ is 2′-F, q⁶ is 1, B4′ is 2′-OMe, and q⁷ is 1; with two phosphorothioate internucleotide linkage modifications within positions 1-5 of the sense strand (counting from the 5′-end of the sense strand), and two phosphorothioate internucleotide linkage modifications at positions 1 and 2 and two phosphorothioate internucleotide linkage modifications within positions 18-23 of the antisense strand (counting from the 5′-end of the antisense strand).

[0339] In one embodiment, B1 is 2′-OMe or 2′-F, n¹ is 8, T1 is 2′F, n² is 3, B2 is 2′-OMe, n³ is 7, n⁴ is 0, B3 is 2′OMe, n⁵ is 3, B1′ is 2′-OMe or 2′-F, q¹ is 9, T1′ is 2′-F, q² is 1, B2′ is 2′-OMe or 2′-F, q³ is 5, T2′ is 2′-F, q⁴ is 1, B3′ is 2′-OMe or 2′-F, q⁵ is 5, T3′ is 2′-F, q⁶ is 1, B4′ is 2′-OMe, and q⁷ is 1; optionally with at least 2 additional TT at the 3′-end of the antisense strand.

[0340] In one embodiment, B1 is 2′-OMe or 2′-F, n¹ is 8, T1 is 2′F, n² is 3, B2 is 2′-OMe, n³ is 7, n⁴ is 0, B3 is 2′-OMe, n⁵ is 3, B1′ is 2′-OMe or 2′-F, q¹ is 9, T1′ is 2′-F, q² is 1, B2′ is 2′-OMe or 2′-F, q³ is 5, T2′ is 2′-F, q⁴ is 1, B3′ is 2′-OMe or 2′-F, q⁵ is 5, T3′ is 2′-F, q⁶ is 1, B4′ is 2′-OMe, and q⁷ is 1; optionally with at least 2 additional TT at the 3′-end of the antisense strand; with two phosphorothioate internucleotide linkage modifications within positions 1-5 of the sense strand (counting from the 5′-end of the sense strand), and two phosphorothioate internucleotide linkage modifications at positions 1 and 2 and two phosphorothioate internucleotide linkage modifications within positions 18-23 of the antisense strand (counting from the 5′-end of the antisense strand).

[0341] In one embodiment, B1 is 2′-OMe or 2′-F, n¹ is 8, T1 is 2′F, n² is 3, B2 is 2′-OMe, n³ is 7, n⁴ is 0, B3 is 2′-OMe, n⁵ is 3, B1′ is 2′-OMe or 2′-F, q¹ is 9, T1′ is 2′-F, q² is 1, B2′ is 2′-OMe or 2′-F, q³ is 4, q⁴ is 0, B3′ is 2′-OMe or 2′-F, q⁵ is 7, T3′ is 2′-F, q⁶ is 1, B4′ is 2′-OMe, and q⁷ is 1.

[0342] In one embodiment, B1 is 2′-OMe or 2′-F, n¹ is 8, T1 is 2′F, n² is 3, B2 is 2′-OMe, n³ is 7, n⁴ is 0, B3 is 2′-OMe, n⁵ is 3, B1′ is 2′-OMe or 2′-F, q¹ is 9, T1′ is 2′-F, q² is 1, B2′ is 2′-OMe or 2′-F, q³ is 4, q⁴ is 0, B3′ is 2′-OMe or 2′-F, q⁵ is 7, T3′ is 2′-F, q⁶ is 1, B4′ is 2′-OMe, and q⁷ is 1; with two phosphorothioate internucleotide linkage modifications within positions 1-5 of the sense strand (counting from the 5′-end), and two phosphorothioate internucleotide linkage modifications at positions 1 and 2 and two phosphorothioate internucleotide linkage modifications within positions 18-23 of the antisense strand (counting from the 5′-end).

[0343] In one embodiment, B1 is 2′-OMe or 2′-F, n¹ is 8, T1 is 2′F, n² is 3, B2 is 2′-OMe, n³ is 7, n⁴ is 0, B3 is 2′OMe, n⁵ is 3, B1′ is 2′-OMe or 2′-F, q¹ is 9, T1′ is 2′-F, q² is 1, B2′ is 2′-OMe or 2′-F, q³ is 4, T2′ is 2′-F, q⁴ is 2, B3′ is 2′-OMe or 2′-F, q⁵ is 5, T3′ is 2′-F, q⁶ is 1, B4′ is 2′-F, and q⁷ is 1. In one embodiment, B1 is 2′-OMe or 2′-F, n¹ is 8, T1 is 2′F, n² is 3, B2 is 2′-OMe, n³ is 7, n⁴ is 0, B3 is 2′-OMe, n⁵ is 3, B1′ is 2′-OMe or 2′-F, q¹ is 9, T1′ is 2′-F, q² is 1, B2′ is 2′-OMe or 2′-F, q³ is 4, T2′ is 2′-F, q⁴ is 2, B3′ is 2′-OMe or 2′-F, q⁵ is 5, T3′ is 2′-F, q⁶ is 1, B4′ is 2′-F, and q⁷ is 1; with two phosphorothioate internucleotide linkage modifications within positions 1-5 of the sense strand (counting from the 5′-end of the sense strand), and two phosphorothioate internucleotide linkage modifications at positions 1 and 2 and two phosphorothioate internucleotide linkage modifications within positions 18-23 of the antisense strand (counting from the 5′-end of the antisense strand).

[0344] In one embodiment, B1 is 2′-OMe or 2′-F, n¹ is 8, T1 is 2′F, n² is 3, B2 is 2′-OMe, n³ is 7, n⁴ is 0, B3 is 2′-OMe, n⁵ is 3, B1′ is 2′-OMe or 2′-F, q¹ is 9, T1′ is 2′-F, q² is 1, B2′ is 2′-OMe or 2′-F, q³ is 4, q⁴ is 0, B3′ is 2′-OMe or 2′-F, q⁵ is 7, T3′ is 2′-F, q⁶ is 1, B4′ is 2′-F, and q⁷ is 1.

[0345] In one embodiment, B1 is 2′-OMe or 2′-F, n¹ is 8, T1 is 2′F, n² is 3, B2 is 2′-OMe, n³ is 7, n⁴ is 0, B3 is 2′-OMe, n⁵ is 3, B1′ is 2′-OMe or 2′-F, q¹ is 9, T1′ is 2′-F, q² is 1, B2′ is 2′-OMe or 2′-F, q³ is 4, q⁴ is 0, B3′ is 2′-OMe or 2′-F, q⁵ is 7, T3′ is 2′-F, q⁶ is 1, B4′ is 2′-F, and q⁷ is 1; with two phosphorothioate internucleotide linkage modifications within positions 1-5 of the sense strand (counting from the 5′-end of the sense strand), and two phosphorothioate internucleotide linkage modifications at positions 1 and 2 and two phosphorothioate internucleotide linkage modifications within positions 18-23 of the antisense strand (counting from the 5′-end of the antisense strand).

[0346] The RNAi agent can comprise a phosphorus-containing group at the 5′-end of the sense strand or antisense strand. The 5′-end phosphorus-containing group can be 5′-end phosphate (5′-P), 5′-end phosphorothioate (5′-PS), 5′-end phosphorodithioate (5′-PS₂), 5′-end vinylphosphonate (5′-VP), 5′-end methylphosphonate (MePhos), or 5′-deoxy-5′-C-malonyl

[chemical structure]

When the 5′-end phosphorus-containing group is 5′-end vinylphosphonate (5′-VP), the 5′-VP can be either 5′-E-VP isomer (i.e., trans-vinylphosphate,

[chemical structure]

5′-Z-VP isomer (i.e., cis-vinylphosphate,

[chemical structure]

or mixtures thereof.
In one embodiment, the RNAi agent comprises a phosphorus-containing group at the 5′-end of the sense strand. In one embodiment, the RNAi agent comprises a phosphorus-containing group at the 5′-end of the antisense strand.

[0347] In one embodiment, the RNAi agent comprises a 5′-P. In one embodiment, the RNAi agent comprises a 5′-P in the antisense strand.

[0348] In one embodiment, the RNAi agent comprises a 5′-PS. In one embodiment, the RNAi agent comprises a 5′-PS in the antisense strand.

[0349] In one embodiment, the RNAi agent comprises a 5′-VP. In one embodiment, the RNAi agent comprises a 5′-VP in the antisense strand. In one embodiment, the RNAi agent comprises a 5′-E-VP in the antisense strand. In one embodiment, the RNAi agent comprises a 5′-Z-VP in the antisense strand.

[0350] In one embodiment, the RNAi agent comprises a 5′-PS₂. In one embodiment, the RNAi agent comprises a 5′-PS₂ in the antisense strand.

[0351] In one embodiment, the RNAi agent comprises a 5′-PS₂. In one embodiment, the RNAi agent comprises a 5′-deoxy-5′-C-malonyl in the antisense strand.

[0352] In one embodiment, B1 is 2′-OMe or 2′-F, n¹ is 8, T1 is 2′F, n² is 3, B2 is 2′-OMe, n³ is 7, n⁴ is 0, B3 is 2′OMe, n⁵ is 3, B1′ is 2′-OMe or 2′-F, q¹ is 9, T1′ is 2′-F, q² is 1, B2′ is 2′-OMe or 2′-F, q³ is 4, T2′ is 2′-F, q⁴ is 2, B3′ is 2′-OMe or 2′-F, q⁵ is 5, T3′ is 2′-F, q⁶ is 1, B4′ is 2′-OMe, and q⁷ is 1. The RNAi agent also comprises a 5′-PS.

[0353] In one embodiment, B1 is 2′-OMe or 2′-F, n¹ is 8, T1 is 2′F, n² is 3, B2 is 2′-OMe, n³ is 7, n⁴ is 0, B3 is 2′OMe, n⁵ is 3, B1′ is 2′-OMe or 2′-F, q¹ is 9, T1′ is 2′-F, q² is 1, B2′ is 2′-OMe or 2′-F, q³ is 4, T2′ is 2′-F, q⁴ is 2, B3′ is 2′-OMe or 2′-F, q⁵ is 5, T3′ is 2′-F, q⁶ is 1, B4′ is 2′-OMe, and q⁷ is 1. The RNAi agent also comprises a 5′-P.

[0354] In one embodiment, B1 is 2′-OMe or 2′-F, n¹ is 8, T1 is 2′F, n² is 3, B2 is 2′-OMe, n³ is 7, n⁴ is 0, B3 is 2′OMe, n⁵ is 3, B1′ is 2′-OMe or 2′-F, q¹ is 9, T1′ is 2′-F, q² is 1, B2′ is 2′-OMe or 2′-F, q³ is 4, T2′ is 2′-F, q⁴ is 2, B3′ is 2′-OMe or 2′-F, q⁵ is 5, T3′ is 2′-F, q⁶ is 1, B4′ is 2′-OMe, and q⁷ is 1. The RNAi agent also comprises a 5′-VP. The 5′-VP may be 5′-E-VP, 5′-Z-VP, or combination thereof.

[0355] In one embodiment, B1 is 2′-OMe or 2′-F, n¹ is 8, T1 is 2′F, n² is 3, B2 is 2′-OMe, n³ is 7, n⁴ is 0, B3 is 2′OMe, n⁵ is 3, B1′ is 2′-OMe or 2′-F, q¹ is 9, T1′ is 2′-F, q² is 1, B2′ is 2′-OMe or 2′-F, q³ is 4, T2′ is 2′-F, q⁴ is 2, B3′ is 2′-OMe or 2′-F, q⁵ is 5, T3′ is 2′-F, q⁶ is 1, B4′ is 2′-OMe, and q⁷ is 1. The RNAi agent also comprises a 5′-PS₂.

[0356] In one embodiment, B1 is 2′-OMe or 2′-F, n¹ is 8, T1 is 2′F, n² is 3, B2 is 2′-OMe, n³ is 7, n⁴ is 0, B3 is 2′OMe, n⁵ is 3, B1′ is 2′-OMe or 2′-F, q¹ is 9, T1′ is 2′-F, q² is 1, B2′ is 2′-OMe or 2′-F, q³ is 4, T2′ is 2′-F, q⁴ is 2, B3′ is 2′-OMe or 2′-F, q⁵ is 5, T3′ is 2′-F, q⁶ is 1, B4′ is 2′-OMe, and q⁷ is 1. The RNAi agent also comprises a 5′-deoxy-5′-C-malonyl.

[0357] In one embodiment, B1 is 2′-OMe or 2′-F, n¹ is 8, T1 is 2′F, n² is 3, B2 is 2′-OMe, n³ is 7, n⁴ is 0, B3 is 2′-OMe, n⁵ is 3, B1′ is 2′-OMe or 2′-F, q¹ is 9, T1′ is 2′-F, q² is 1, B2′ is 2′-OMe or 2′-F, q³ is 4, T2′ is 2′-F, q⁴ is 2, B3′ is 2′-OMe or 2′-F, q⁵ is 5, T3′ is 2′-F, q⁶ is 1, B4′ is 2′-OMe, and q⁷ is 1; with two phosphorothioate internucleotide linkage modifications within position 1-5 of the sense strand (counting from the 5′-end of the sense strand), and two phosphorothioate internucleotide linkage modifications at positions 1 and 2 and two phosphorothioate internucleotide linkage modifications within positions 18-23 of the antisense strand (counting from the 5′-end of the antisense strand). The RNAi agent also comprises a 5′-P.

[0358] In one embodiment, B1 is 2′-OMe or 2′-F, n¹ is 8, T1 is 2′F, n² is 3, B2 is 2′-OMe, n³ is 7, n⁴ is 0, B3 is 2′-OMe, n⁵ is 3, B1′ is 2′-OMe or 2′-F, q¹ is 9, T1′ is 2′-F, q² is 1, B2′ is 2′-OMe or 2′-F, q³ is 4, T2′ is 2′-F, q⁴ is 2, B3′ is 2′-OMe or 2′-F, q⁵ is 5, T3′ is 2′-F, q⁶ is 1, B4′ is 2′-OMe, and q⁷ is 1; with two phosphorothioate internucleotide linkage modifications within position 1-5 of the sense strand (counting from the 5′-end of the sense strand), and two phosphorothioate internucleotide linkage modifications at positions 1 and 2 and two phosphorothioate internucleotide linkage modifications within positions 18-23 of the antisense strand (counting from the 5′-end of the antisense strand). The RNAi agent also comprises a 5′-PS.

[0359] In one embodiment, B1 is 2′-OMe or 2′-F, n¹ is 8, T1 is 2′F, n² is 3, B2 is 2′-OMe, n³ is 7, n⁴ is 0, B3 is 2′-OMe, n⁵ is 3, B1′ is 2′-OMe or 2′-F, q¹ is 9, T1′ is 2′-F, q² is 1, B2′ is 2′-OMe or 2′-F, q³ is 4, T2′ is 2′-F, q⁴ is 2, B3′ is 2′-OMe or 2′-F, q⁵ is 5, T3′ is 2′-F, q⁶ is 1, B4′ is 2′-OMe, and q⁷ is 1; with two phosphorothioate internucleotide linkage modifications within position 1-5 of the sense strand (counting from the 5′-end of the sense strand), and two phosphorothioate internucleotide linkage modifications at positions 1 and 2 and two phosphorothioate internucleotide linkage modifications within positions 18-23 of the antisense strand (counting from the 5′-end of the antisense strand). The RNAi agent also comprises a 5′-VP. The 5′-VP may be 5′-E-VP, 5′-Z-VP, or combination thereof.

In one embodiment, B1 is 2′-OMe or 2′-F, n¹ is 8, T1 is 2′F, n² is 3, B2 is 2′-OMe, n³ is 7, n⁴ is 0, B3 is 2′-OMe, n⁵ is 3, B1′ is 2′-OMe or 2′-F, q¹ is 9, T1′ is 2′-F, q² is 1, B2′ is 2′-OMe or 2′-F, q³ is 4, T2′ is 2′-F, q⁴ is 2, B3′ is 2′-OMe or 2′-F, q⁵ is 5, T3′ is 2′-F, q⁶ is 1, B4′ is 2′-OMe, and q⁷ is 1; with two phosphorothioate internucleotide linkage modifications within position 1-5 of the sense strand (counting from the 5′-end of the sense strand), and two phosphorothioate internucleotide linkage modifications at positions 1 and 2 and two phosphorothioate internucleotide linkage modifications within positions 18-23 of the antisense strand (counting from the 5′-end of the antisense strand). The RNAi agent also comprises a 5′-PS₂.

[0360] In one embodiment, B1 is 2′-OMe or 2′-F, n¹ is 8, T1 is 2′F, n² is 3, B2 is 2′-OMe, n³ is 7, n⁴ is 0, B3 is 2′-OMe, n⁵ is 3, B1′ is 2′-OMe or 2′-F, q¹ is 9, T1′ is 2′-F, q² is 1, B2′ is 2′-OMe or 2′-F, q³ is 4, T2′ is 2′-F, q⁴ is 2, B3′ is 2′-OMe or 2′-F, q⁵ is 5, T3′ is 2′-F, q⁶ is 1, B4′ is 2′-OMe, and q⁷ is 1; with two phosphorothioate internucleotide linkage modifications within position 1-5 of the sense strand (counting from the 5′-end of the sense strand), and two phosphorothioate internucleotide linkage modifications at positions 1 and 2 and two phosphorothioate internucleotide linkage modifications within positions 18-23 of the antisense strand (counting from the 5′-end of the antisense strand). The RNAi agent also comprises a 5′-deoxy-5′-C-malonyl.

[0361] In one embodiment, B1 is 2′-OMe or 2′-F, n¹ is 8, T1 is 2′F, n² is 3, B2 is 2′-OMe, n³ is 7, n⁴ is 0, B3 is 2′-OMe, n⁵ is 3, B1′ is 2′-OMe or 2′-F, q¹ is 9, T1′ is 2′-F, q² is 1, B2′ is 2′-OMe or 2′-F, q³ is 4, q⁴ is 0, B3′ is 2′-OMe or 2′-F, q⁵ is 7, T3′ is 2′-F, q⁶ is 1, B4′ is 2′-OMe, and q⁷ is 1. The RNAi agent also comprises a 5′-P.

[0362] In one embodiment, B1 is 2′-OMe or 2′-F, n¹ is 8, T1 is 2′F, n² is 3, B2 is 2′-OMe, n³ is 7, n⁴ is 0, B3 is 2′-OMe, n⁵ is 3, B1′ is 2′-OMe or 2′-F, q¹ is 9, T1′ is 2′-F, q² is 1, B2′ is 2′-OMe or 2′-F, q³ is 4, q⁴ is 0, B3′ is 2′-OMe or 2′-F, q⁵ is 7, T3′ is 2′-F, q⁶ is 1, B4′ is 2′-OMe, and q⁷ is 1. The dsRNA agent also comprises a 5′-PS.

[0363] In one embodiment, B1 is 2′-OMe or 2′-F, n¹ is 8, T1 is 2′F, n² is 3, B2 is 2′-OMe, n³ is 7, n⁴ is 0, B3 is 2′-OMe, n⁵ is 3, B1′ is 2′-OMe or 2′-F, q¹ is 9, T1′ is 2′-F, q² is 1, B2′ is 2′-OMe or 2′-F, q³ is 4, q⁴ is 0, B3′ is 2′-OMe or 2′-F, q⁵ is 7, T3′ is 2′-F, q⁶ is 1, B4′ is 2′-OMe, and q⁷ is 1. The RNAi agent also comprises a 5′-VP. The 5′-VP may be 5′-E-VP, 5′-Z-VP, or combination thereof.

[0364] In one embodiment, B1 is 2′-OMe or 2′-F, n¹ is 8, T1 is 2′F, n² is 3, B2 is 2′-OMe, n³ is 7, n⁴ is 0, B3 is 2′-OMe, n⁵ is 3, B1′ is 2′-OMe or 2′-F, q¹ is 9, T1′ is 2′-F, q² is 1, B2′ is 2′-OMe or 2′-F, q³ is 4, q⁴ is 0, B3′ is 2′-OMe or 2′-F, q⁵ is 7, T3′ is 2′-F, q⁶ is 1, B4′ is 2′-OMe, and q⁷ is 1. The RNAi agent also comprises a 5′-PS₂.

[0365] In one embodiment, B1 is 2′-OMe or 2′-F, n¹ is 8, T1 is 2′F, n² is 3, B2 is 2′-OMe, n³ is 7, n⁴ is 0, B3 is 2′-OMe, n⁵ is 3, B1′ is 2′-OMe or 2′-F, q¹ is 9, T1′ is 2′-F, q² is 1, B2′ is 2′-OMe or 2′-F, q³ is 4, q⁴ is 0, B3′ is 2′-OMe or 2′-F, q⁵ is 7, T3′ is 2′-F, q⁶ is 1, B4′ is 2′-OMe, and q⁷ is 1. The RNAi agent also comprises a 5′-deoxy-5′-C-malonyl.

[0366] In one embodiment, B1 is 2′-OMe or 2′-F, n¹ is 8, T1 is 2′F, n² is 3, B2 is 2′-OMe, n³ is 7, n⁴ is 0, B3 is 2′-OMe, n⁵ is 3, B1′ is 2′-OMe or 2′-F, q¹ is 9, T1′ is 2′-F, q² is 1, B2′ is 2′-OMe or 2′-F, q³ is 4, q⁴ is 0, B3′ is 2′-OMe or 2′-F, q⁵ is 7, T3′ is 2′-F, q⁶ is 1, B4′ is 2′-OMe, and q⁷ is 1; with two phosphorothioate internucleotide linkage modifications within position 1-5 of the sense strand (counting from the 5′-end), and two phosphorothioate internucleotide linkage modifications at positions 1 and 2 and two phosphorothioate internucleotide linkage modifications within positions 18-23 of the antisense strand (counting from the 5′-end). The RNAi agent also comprises a 5′-P.

[0367] In one embodiment, B1 is 2′-OMe or 2′-F, n¹ is 8, T1 is 2′F, n² is 3, B2 is 2′-OMe, n³ is 7, n⁴ is 0, B3 is 2′-OMe, n⁵ is 3, B1′ is 2′-OMe or 2′-F, q¹ is 9, T1′ is 2′-F, q² is 1, B2′ is 2′-OMe or 2′-F, q³ is 4, q⁴ is 0, B3′ is 2′-OMe or 2′-F, q⁵ is 7, T3′ is 2′-F, q⁶ is 1, B4′ is 2′-OMe, and q⁷ is 1; with two phosphorothioate internucleotide linkage modifications within position 1-5 of the sense strand (counting from the 5′-end), and two phosphorothioate internucleotide linkage modifications at positions 1 and 2 and two phosphorothioate internucleotide linkage modifications within positions 18-23 of the antisense strand (counting from the 5′-end). The RNAi agent also comprises a 5′-PS.

[0368] In one embodiment, B1 is 2′-OMe or 2′-F, n¹ is 8, T1 is 2′F, n² is 3, B2 is 2′-OMe, n³ is 7, n⁴ is 0, B3 is 2′-OMe, n⁵ is 3, B1′ is 2′-OMe or 2′-F, q¹ is 9, T1′ is 2′-F, q² is 1, B2′ is 2′-OMe or 2′-F, q³ is 4, q⁴ is 0, B3′ is 2′-OMe or 2′-F, q⁵ is 7, T3′ is 2′-F, q⁶ is 1, B4′ is 2′-OMe, and q⁷ is 1; with two phosphorothioate internucleotide linkage modifications within position 1-5 of the sense strand (counting from the 5′-end), and two phosphorothioate internucleotide linkage modifications at positions 1 and 2 and two phosphorothioate internucleotide linkage modifications within positions 18-23 of the antisense strand (counting from the 5′-end). The RNAi agent also comprises a 5′-VP. The 5′-VP may be 5′-E-VP, 5′-Z-VP, or combination thereof.

[0369] In one embodiment, B1 is 2′-OMe or 2′-F, n¹ is 8, T1 is 2′F, n² is 3, B2 is 2′-OMe, n³ is 7, n⁴ is 0, B3 is 2′-OMe, n⁵ is 3, B1′ is 2′-OMe or 2′-F, q¹ is 9, T1′ is 2′-F, q² is 1, B2′ is 2′-OMe or 2′-F, q³ is 4, q⁴ is 0, B3′ is 2′-OMe or 2′-F, q⁵ is 7, T3′ is 2′-F, q⁶ is 1, B4′ is 2′-OMe, and q⁷ is 1; with two phosphorothioate internucleotide linkage modifications within position 1-5 of the sense strand (counting from the 5′-end), and two phosphorothioate internucleotide linkage modifications at positions 1 and 2 and two phosphorothioate internucleotide linkage modifications within positions 18-23 of the antisense strand (counting from the 5′-end). The RNAi agent also comprises a 5′-PS₂.

[0370] In one embodiment, B1 is 2′-OMe or 2′-F, n¹ is 8, T1 is 2′F, n² is 3, B2 is 2′-OMe, n³ is 7, n⁴ is 0, B3 is 2′-OMe, n⁵ is 3, B1′ is 2′-OMe or 2′-F, q¹ is 9, T1′ is 2′-F, q² is 1, B2′ is 2′-OMe or 2′-F, q³ is 4, q⁴ is 0, B3′ is 2′-OMe or 2′-F, q⁵ is 7, T3′ is 2′-F, q⁶ is 1, B4′ is 2′-OMe, and q⁷ is 1; with two phosphorothioate internucleotide linkage modifications within position 1-5 of the sense strand (counting from the 5′-end), and two phosphorothioate internucleotide linkage modifications at positions 1 and 2 and two phosphorothioate internucleotide linkage modifications within positions 18-23 of the antisense strand (counting from the 5′-end). The RNAi agent also comprises a 5′-deoxy-5′-C-malonyl.

In one embodiment, B1 is 2′-OMe or 2′-F, n¹ is 8, T1 is 2′F, n² is 3, B2 is 2′-OMe, n³ is 7, n⁴ is 0, B3 is 2′OMe, n⁵ is 3, B1′ is 2′-OMe or 2′-F, q¹ is 9, T1′ is 2′-F, q² is 1, B2′ is 2′-OMe or 2′-F, q³ is 4, T2′ is 2′-F, q⁴ is 2, B3′ is 2′-OMe or 2′-F, q⁵ is 5, T3′ is 2′-F, q⁶ is 1, B4′ is 2′-F, and q⁷ is 1. The RNAi agent also comprises a 5′-P.

[0371] In one embodiment, B1 is 2′-OMe or 2′-F, n¹ is 8, T1 is 2′F, n² is 3, B2 is 2′-OMe, n³ is 7, n⁴ is 0, B3 is 2′OMe, n⁵ is 3, B1′ is 2′-OMe or 2′-F, q¹ is 9, T1′ is 2′-F, q² is 1, B2′ is 2′-OMe or 2′-F, q³ is 4, T2′ is 2′-F, q⁴ is 2, B3′ is 2′-OMe or 2′-F, q⁵ is 5, T3′ is 2′-F, q⁶ is 1, B4′ is 2′-F, and q⁷ is 1. The RNAi agent also comprises a 5′-PS.

[0372] In one embodiment, B1 is 2′-OMe or 2′-F, n¹ is 8, T1 is 2′F, n² is 3, B2 is 2′-OMe, n³ is 7, n⁴ is 0, B3 is 2′OMe, n⁵ is 3, B1′ is 2′-OMe or 2′-F, q¹ is 9, T1′ is 2′-F, q² is 1, B2′ is 2′-OMe or 2′-F, q³ is 4, T2′ is 2′-F, q⁴ is 2, B3′ is 2′-OMe or 2′-F, q⁵ is 5, T3′ is 2′-F, q⁶ is 1, B4′ is 2′-F, and q⁷ is 1. The RNAi agent also comprises a 5′-VP. The 5′-VP may be 5′-E-VP, 5′-Z-VP, or combination thereof.

In one embodiment, B1 is 2′-OMe or 2′-F, n¹ is 8, T1 is 2′F, n² is 3, B2 is 2′-OMe, n³ is 7, n⁴ is 0, B3 is 2′OMe, n⁵ is 3, B1′ is 2′-OMe or 2′-F, q¹ is 9, T1′ is 2′-F, q² is 1, B2′ is 2′-OMe or 2′-F, q³ is 4, T2′ is 2′-F, q⁴ is 2, B3′ is 2′-OMe or 2′-F, q⁵ is 5, T3′ is 2′-F, q⁶ is 1, B4′ is 2′-F, and q⁷ is 1. The dsRNAi RNA agent also comprises a 5′-PS₂.

[0373] In one embodiment, B1 is 2′-OMe or 2′-F, n¹ is 8, T1 is 2′F, n² is 3, B2 is 2′-OMe, n³ is 7, n⁴ is 0, B3 is 2′OMe, n⁵ is 3, B1′ is 2′-OMe or 2′-F, q¹ is 9, T1′ is 2′-F, q² is 1, B2′ is 2′-OMe or 2′-F, q³ is 4, T2′ is 2′-F, q⁴ is 2, B3′ is 2′-OMe or 2′-F, q⁵ is 5, T3′ is 2′-F, q⁶ is 1, B4′ is 2′-F, and q⁷ is 1. The RNAi agent also comprises a 5′-deoxy-5′-C-malonyl.

[0374] In one embodiment, B1 is 2′-OMe or 2′-F, n¹ is 8, T1 is 2′F, n² is 3, B2 is 2′-OMe, n³ is 7, n⁴ is 0, B3 is 2′-OMe, n⁵ is 3, B1′ is 2′-OMe or 2′-F, q¹ is 9, T1′ is 2′-F, q² is 1, B2′ is 2′-OMe or 2′-F, q³ is 4, T2′ is 2′-F, q⁴ is 2, B3′ is 2′-OMe or 2′-F, q⁵ is 5, T3′ is 2′-F, q⁶ is 1, B4′ is 2′-F, and q⁷ is 1; with two phosphorothioate internucleotide linkage modifications within position 1-5 of the sense strand (counting from the 5′-end of the sense strand), and two phosphorothioate internucleotide linkage modifications at positions 1 and 2 and two phosphorothioate internucleotide linkage modifications within positions 18-23 of the antisense strand (counting from the 5′-end of the antisense strand). The RNAi agent also comprises a 5′-P.

[0375] In one embodiment, B1 is 2′-OMe or 2′-F, n¹ is 8, T1 is 2′F, n² is 3, B2 is 2′-OMe, n³ is 7, n⁴ is 0, B3 is 2′-OMe, n⁵ is 3, B1′ is 2′-OMe or 2′-F, q¹ is 9, T1′ is 2′-F, q² is 1, B2′ is 2′-OMe or 2′-F, q³ is 4, T2′ is 2′-F, q⁴ is 2, B3′ is 2′-OMe or 2′-F, q⁵ is 5, T3′ is 2′-F, q⁶ is 1, B4′ is 2′-F, and q⁷ is 1; with two phosphorothioate internucleotide linkage modifications within position 1-5 of the sense strand (counting from the 5′-end of the sense strand), and two phosphorothioate internucleotide linkage modifications at positions 1 and 2 and two phosphorothioate internucleotide linkage modifications within positions 18-23 of the antisense strand (counting from the 5′-end of the antisense strand). The RNAi agent also comprises a 5′-PS.

[0376] In one embodiment, B1 is 2′-OMe or 2′-F, n¹ is 8, T1 is 2′F, n² is 3, B2 is 2′-OMe, n³ is 7, n⁴ is 0, B3 is 2′-OMe, n⁵ is 3, B1′ is 2′-OMe or 2′-F, q¹ is 9, T1′ is 2′-F, q² is 1, B2′ is 2′-OMe or 2′-F, q³ is 4, T2′ is 2′-F, q⁴ is 2, B3′ is 2′-OMe or 2′-F, q⁵ is 5, T3′ is 2′-F, q⁶ is 1, B4′ is 2′-F, and q⁷ is 1; with two phosphorothioate internucleotide linkage modifications within position 1-5 of the sense strand (counting from the 5′-end of the sense strand), and two phosphorothioate internucleotide linkage modifications at positions 1 and 2 and two phosphorothioate internucleotide linkage modifications within positions 18-23 of the antisense strand (counting from the 5′-end of the antisense strand). The RNAi agent also comprises a 5′-VP. The 5′-VP may be 5′-E-VP, 5′-Z-VP, or combination thereof.

[0377] In one embodiment, B1 is 2′-OMe or 2′-F, n¹ is 8, T1 is 2′F, n² is 3, B2 is 2′-OMe, n³ is 7, n⁴ is 0, B3 is 2′-OMe, n⁵ is 3, B1′ is 2′-OMe or 2′-F, q¹ is 9, T1′ is 2′-F, q² is 1, B2′ is 2′-OMe or 2′-F, q³ is 4, T2′ is 2′-F, q⁴ is 2, B3′ is 2′-OMe or 2′-F, q⁵ is 5, T3′ is 2′-F, q⁶ is 1, B4′ is 2′-F, and q⁷ is 1; with two phosphorothioate internucleotide linkage modifications within position 1-5 of the sense strand (counting from the 5′-end of the sense strand), and two phosphorothioate internucleotide linkage modifications at positions 1 and 2 and two phosphorothioate internucleotide linkage modifications within positions 18-23 of the antisense strand (counting from the 5′-end of the antisense strand). The RNAi agent also comprises a 5′-PS₂.

[0378] In one embodiment, B1 is 2′-OMe or 2′-F, n¹ is 8, T1 is 2′F, n² is 3, B2 is 2′-OMe, n³ is 7, n⁴ is 0, B3 is 2′-OMe, n⁵ is 3, B1′ is 2′-OMe or 2′-F, q¹ is 9, T1′ is 2′-F, q² is 1, B2′ is 2′-OMe or 2′-F, q³ is 4, T2′ is 2′-F, q⁴ is 2, B3′ is 2′-OMe or 2′-F, q⁵ is 5, T3′ is 2′-F, q⁶ is 1, B4′ is 2′-F, and q⁷ is 1; with two phosphorothioate internucleotide linkage modifications within position 1-5 of the sense strand (counting from the 5′-end of the sense strand), and two phosphorothioate internucleotide linkage modifications at positions 1 and 2 and two phosphorothioate internucleotide linkage modifications within positions 18-23 of the antisense strand (counting from the 5′-end of the antisense strand). The RNAi agent also comprises a 5′-deoxy-5′-C-malonyl.

[0379] In one embodiment, B1 is 2′-OMe or 2′-F, n¹ is 8, T1 is 2′F, n² is 3, B2 is 2′-OMe, n³ is 7, n⁴ is 0, B3 is 2′-OMe, n⁵ is 3, B1′ is 2′-OMe or 2′-F, q¹ is 9, T1′ is 2′-F, q² is 1, B2′ is 2′-OMe or 2′-F, q³ is 4, q⁴ is 0, B3′ is 2′-OMe or 2′-F, q⁵ is 7, T3′ is 2′-F, q⁶ is 1, B4′ is 2′-F, and q⁷ is 1. The RNAi agent also comprises a 5′-P.

[0380] In one embodiment, B1 is 2′-OMe or 2′-F, n¹ is 8, T1 is 2′F, n² is 3, B2 is 2′-OMe, n³ is 7, n⁴ is 0, B3 is 2′-OMe, n⁵ is 3, B1′ is 2′-OMe or 2′-F, q¹ is 9, T1′ is 2′-F, q² is 1, B2′ is 2′-OMe or 2′-F, q³ is 4, q⁴ is 0, B3′ is 2′-OMe or 2′-F, q⁵ is 7, T3′ is 2′-F, q⁶ is 1, B4′ is 2′-F, and q⁷ is 1. The RNAi agent also comprises a 5′-PS.

[0381] In one embodiment, B1 is 2′-OMe or 2′-F, n¹ is 8, T1 is 2′F, n² is 3, B2 is 2′-OMe, n³ is 7, n⁴ is 0, B3 is 2′-OMe, n⁵ is 3, B1′ is 2′-OMe or 2′-F, q¹ is 9, T1′ is 2′-F, q² is 1, B2′ is 2′-OMe or 2′-F, q³ is 4, q⁴ is 0, B3′ is 2′-OMe or 2′-F, q⁵ is 7, T3′ is 2′-F, q⁶ is 1, B4′ is 2′-F, and q⁷ is 1. The RNAi agent also comprises a 5′-VP. The 5′-VP may be 5′-E-VP, 5′-Z-VP, or combination thereof.

[0382] In one embodiment, B1 is 2′-OMe or 2′-F, n¹ is 8, T1 is 2′F, n² is 3, B2 is 2′-OMe, n³ is 7, n⁴ is 0, B3 is 2′-OMe, n⁵ is 3, B1′ is 2′-OMe or 2′-F, q¹ is 9, T1′ is 2′-F, q² is 1, B2′ is 2′-OMe or 2′-F, q³ is 4, q⁴ is 0, B3′ is 2′-OMe or 2′-F, q⁵ is 7, T3′ is 2′-F, q⁶ is 1, B4′ is 2′-F, and q⁷ is 1. The RNAi agent also comprises a 5′-PS₂.

[0383] In one embodiment, B1 is 2′-OMe or 2′-F, n¹ is 8, T1 is 2′F, n² is 3, B2 is 2′-OMe, n³ is 7, n⁴ is 0, B3 is 2′-OMe, n⁵ is 3, B1′ is 2′-OMe or 2′-F, q¹ is 9, T1′ is 2′-F, q² is 1, B2′ is 2′-OMe or 2′-F, q³ is 4, q⁴ is 0, B3′ is 2′-OMe or 2′-F, q⁵ is 7, T3′ is 2′-F, q⁶ is 1, B4′ is 2′-F, and q⁷ is 1. The RNAi agent also comprises a 5′-deoxy-5′-C-malonyl.

[0384] In one embodiment, B1 is 2′-OMe or 2′-F, n¹ is 8, T1 is 2′F, n² is 3, B2 is 2′-OMe, n³ is 7, n⁴ is 0, B3 is 2′-OMe, n⁵ is 3, B1′ is 2′-OMe or 2′-F, q¹ is 9, T1′ is 2′-F, q² is 1, B2′ is 2′-OMe or 2′-F, q³ is 4, q⁴ is 0, B3′ is 2′-OMe or 2′-F, q⁵ is 7, T3′ is 2′-F, q⁶ is 1, B4′ is 2′-F, and q⁷ is 1; with two phosphorothioate internucleotide linkage modifications within position 1-5 of the sense strand (counting from the 5′-end of the sense strand), and two phosphorothioate internucleotide linkage modifications at positions 1 and 2 and two phosphorothioate internucleotide linkage modifications within positions 18-23 of the antisense strand (counting from the 5′-end of the antisense strand). The RNAi agent also comprises a 5′-P.

[0385] In one embodiment, B1 is 2′-OMe or 2′-F, n¹ is 8, T1 is 2′F, n² is 3, B2 is 2′-OMe, n³ is 7, n⁴ is 0, B3 is 2′-OMe, n⁵ is 3, B1′ is 2′-OMe or 2′-F, q¹ is 9, T1′ is 2′-F, q² is 1, B2′ is 2′-OMe or 2′-F, q³ is 4, q⁴ is 0, B3′ is 2′-OMe or 2′-F, q⁵ is 7, T3′ is 2′-F, q⁶ is 1, B4′ is 2′-F, and q⁷ is 1; with two phosphorothioate internucleotide linkage modifications within position 1-5 of the sense strand (counting from the 5′-end of the sense strand), and two phosphorothioate internucleotide linkage modifications at positions 1 and 2 and two phosphorothioate internucleotide linkage modifications within positions 18-23 of the antisense strand (counting from the 5′-end of the antisense strand). The RNAi agent also comprises a 5′-PS.

[0386] In one embodiment, B1 is 2′-OMe or 2′-F, n¹ is 8, T1 is 2′F, n² is 3, B2 is 2′-OMe, n³ is 7, n⁴ is 0, B3 is 2′-OMe, n⁵ is 3, B1′ is 2′-OMe or 2′-F, q¹ is 9, T1′ is 2′-F, q² is 1, B2′ is 2′-OMe or 2′-F, q³ is 4, q⁴ is 0, B3′ is 2′-OMe or 2′-F, q⁵ is 7, T3′ is 2′-F, q⁶ is 1, B4′ is 2′-F, and q⁷ is 1; with two phosphorothioate internucleotide linkage modifications within position 1-5 of the sense strand (counting from the 5′-end of the sense strand), and two phosphorothioate internucleotide linkage modifications at positions 1 and 2 and two phosphorothioate internucleotide linkage modifications within positions 18-23 of the antisense strand (counting from the 5′-end of the antisense strand). The RNAi agent also comprises a 5′-VP. The 5′-VP may be 5′-E-VP, 5′-Z-VP, or combination thereof.

[0387] In one embodiment, B1 is 2′-OMe or 2′-F, n¹ is 8, T1 is 2′F, n² is 3, B2 is 2′-OMe, n³ is 7, n⁴ is 0, B3 is 2′-OMe, n⁵ is 3, B1′ is 2′-OMe or 2′-F, q¹ is 9, T1′ is 2′-F, q² is 1, B2′ is 2′-OMe or 2′-F, q³ is 4, q⁴ is 0, B3′ is 2′-OMe or 2′-F, q⁵ is 7, T3′ is 2′-F, q⁶ is 1, B4′ is 2′-F, and q⁷ is 1; with two phosphorothioate internucleotide linkage modifications within position 1-5 of the sense strand (counting from the 5′-end of the sense strand), and two phosphorothioate internucleotide linkage modifications at positions 1 and 2 and two phosphorothioate internucleotide linkage modifications within positions 18-23 of the antisense strand (counting from the 5′-end of the antisense strand). The RNAi agent also comprises a 5′-PS₂.

[0388] In one embodiment, B1 is 2′-OMe or 2′-F, n¹ is 8, T1 is 2′F, n² is 3, B2 is 2′-OMe, n³ is 7, n⁴ is 0, B3 is 2′-OMe, n⁵ is 3, B1′ is 2′-OMe or 2′-F, q¹ is 9, T1′ is 2′-F, q² is 1, B2′ is 2′-OMe or 2′-F, q³ is 4, q⁴ is 0, B3′ is 2′-OMe or 2′-F, q⁵ is 7, T3′ is 2′-F, q⁶ is 1, B4′ is 2′-F, and q⁷ is 1; with two phosphorothioate internucleotide linkage modifications within position 1-5 of the sense strand (counting from the 5′-end of the sense strand), and two phosphorothioate internucleotide linkage modifications at positions 1 and 2 and two phosphorothioate internucleotide linkage modifications within positions 18-23 of the antisense strand (counting from the 5′-end of the antisense strand). The RNAi agent also comprises a 5′-deoxy-5′-C-malonyl.

[0389] In one embodiment, B1 is 2′-OMe or 2′-F, n¹ is 8, T1 is 2′F, n² is 3, B2 is 2′-OMe, n³ is 7, n⁴ is 0, B3 is 2′-OMe, n⁵ is 3, B1′ is 2′-OMe or 2′-F, q¹ is 9, T1′ is 2′-F, q² is 1, B2′ is 2′-OMe or 2′-F, q³ is 4, T2′ is 2′-F, q⁴ is 2, B3′ is 2′-OMe or 2′-F, q⁵ is 5, T3′ is 2′-F, q⁶ is 1, B4′ is 2′-OMe, and q⁷ is 1; with two phosphorothioate internucleotide linkage modifications within position 1-5 of the sense strand (counting from the 5′-end of the sense strand), and two phosphorothioate internucleotide linkage modifications at positions 1 and 2 and two phosphorothioate internucleotide linkage modifications within positions 18-23 of the antisense strand (counting from the 5′-end of the antisense strand). The RNAi agent also comprises a 5′-P and a targeting ligand. In one embodiment, the 5′-P is at the 5′-end of the antisense strand, and the targeting ligand is at the 3′-end of the sense strand.

[0390] In one embodiment, B1 is 2′-OMe or 2′-F, n¹ is 8, T1 is 2′F, n² is 3, B2 is 2′-OMe, n³ is 7, n⁴ is 0, B3 is 2′-OMe, n⁵ is 3, B1′ is 2′-OMe or 2′-F, q¹ is 9, T1′ is 2′-F, q² is 1, B2′ is 2′-OMe or 2′-F, q³ is 4, T2′ is 2′-F, q⁴ is 2, B3′ is 2′-OMe or 2′-F, q⁵ is 5, T3′ is 2′-F, q⁶ is 1, B4′ is 2′-OMe, and q⁷ is 1; with two phosphorothioate internucleotide linkage modifications within position 1-5 of the sense strand (counting from the 5′-end of the sense strand), and two phosphorothioate internucleotide linkage modifications at positions 1 and 2 and two phosphorothioate internucleotide linkage modifications within positions 18-23 of the antisense strand (counting from the 5′-end of the antisense strand). The RNAi agent also comprises a 5′-PS and a targeting ligand. In one embodiment, the 5′-PS is at the 5′-end of the antisense strand, and the targeting ligand is at the 3′-end of the sense strand.

[0391] In one embodiment, B1 is 2′-OMe or 2′-F, n¹ is 8, T1 is 2′F, n² is 3, B2 is 2′-OMe, n³ is 7, n⁴ is 0, B3 is 2′-OMe, n⁵ is 3, B1′ is 2′-OMe or 2′-F, q¹ is 9, T1′ is 2′-F, q² is 1, B2′ is 2′-OMe or 2′-F, q³ is 4, T2′ is 2′-F, q⁴ is 2, B3′ is 2′-OMe or 2′-F, q⁵ is 5, T3′ is 2′-F, q⁶ is 1, B4′ is 2′-OMe, and q⁷ is 1; with two phosphorothioate internucleotide linkage modifications within position 1-5 of the sense strand (counting from the 5′-end of the sense strand), and two phosphorothioate internucleotide linkage modifications at positions 1 and 2 and two phosphorothioate internucleotide linkage modifications within positions 18-23 of the antisense strand (counting from the 5′-end of the antisense strand). The RNAi agent also comprises a 5′-VP (e.g., a 5′-E-VP, 5′-Z-VP, or combination thereof), and a targeting ligand.

[0392] In one embodiment, the 5′-VP is at the 5′-end of the antisense strand, and the targeting ligand is at the 3′-end of the sense strand.

[0393] In one embodiment, B1 is 2′-OMe or 2′-F, n¹ is 8, T1 is 2′F, n² is 3, B2 is 2′-OMe, n³ is 7, n⁴ is 0, B3 is 2′-OMe, n⁵ is 3, B1′ is 2′-OMe or 2′-F, q¹ is 9, T1′ is 2′-F, q² is 1, B2′ is 2′-OMe or 2′-F, q³ is 4, T2′ is 2′-F, q⁴ is 2, B3′ is 2′-OMe or 2′-F, q⁵ is 5, T3′ is 2′-F, q⁶ is 1, B4′ is 2′-OMe, and q⁷ is 1; with two phosphorothioate internucleotide linkage modifications within position 1-5 of the sense strand (counting from the 5′-end of the sense strand), and two phosphorothioate internucleotide linkage modifications at positions 1 and 2 and two phosphorothioate internucleotide linkage modifications within positions 18-23 of the antisense strand (counting from the 5′-end of the antisense strand). The RNAi agent also comprises a 5′-PS₂ and a targeting ligand. In one embodiment, the 5′-PS₂ is at the 5′-end of the antisense strand, and the targeting ligand is at the 3′-end of the sense strand.

[0394] In one embodiment, B1 is 2′-OMe or 2′-F, n¹ is 8, T1 is 2′F, n² is 3, B2 is 2′-OMe, n³ is 7, n⁴ is 0, B3 is 2′-OMe, n⁵ is 3, B1′ is 2′-OMe or 2′-F, q¹ is 9, T1′ is 2′-F, q² is 1, B2′ is 2′-OMe or 2′-F, q³ is 4, T2′ is 2′-F, q⁴ is 2, B3′ is 2′-OMe or 2′-F, q⁵ is 5, T3′ is 2′-F, q⁶ is 1, B4′ is 2′-OMe, and q⁷ is 1; with two phosphorothioate internucleotide linkage modifications within position 1-5 of the sense strand (counting from the 5′-end of the sense strand), and two phosphorothioate internucleotide linkage modifications at positions 1 and 2 and two phosphorothioate internucleotide linkage modifications within positions 18-23 of the antisense strand (counting from the 5′-end of the antisense strand). The RNAi agent also comprises a 5′-deoxy-5′-C-malonyl and a targeting ligand. In one embodiment, the 5′-deoxy-5′-C-malonyl is at the 5′-end of the antisense strand, and the targeting ligand is at the 3′-end of the sense strand.

[0395] In one embodiment, B1 is 2′-OMe or 2′-F, n¹ is 8, T1 is 2′F, n² is 3, B2 is 2′-OMe, n³ is 7, n⁴ is 0, B3 is 2′-OMe, n⁵ is 3, B1′ is 2′-OMe or 2′-F, q¹ is 9, T1′ is 2′-F, q² is 1, B2′ is 2′-OMe or 2′-F, q³ is 4, q⁴ is 0, B3′ is 2′-OMe or 2′-F, q⁵ is 7, T3′ is 2′-F, q⁶ is 1, B4′ is 2′-OMe, and q⁷ is 1; with two phosphorothioate internucleotide linkage modifications within position 1-5 of the sense strand (counting from the 5′-end), and two phosphorothioate internucleotide linkage modifications at positions 1 and 2 and two phosphorothioate internucleotide linkage modifications within positions 18-23 of the antisense strand (counting from the 5′-end). The RNAi agent also comprises a 5′-P and a targeting ligand. In one embodiment, the 5′-P is at the 5′-end of the antisense strand, and the targeting ligand is at the 3′-end of the sense strand.

[0396] In one embodiment, B1 is 2′-OMe or 2′-F, n¹ is 8, T1 is 2′F, n² is 3, B2 is 2′-OMe, n³ is 7, n⁴ is 0, B3 is 2′-OMe, n⁵ is 3, B1′ is 2′-OMe or 2′-F, q¹ is 9, T1′ is 2′-F, q² is 1, B2′ is 2′-OMe or 2′-F, q³ is 4, q⁴ is 0, B3′ is 2′-OMe or 2′-F, q⁵ is 7, T3′ is 2′-F, q⁶ is 1, B4′ is 2′-OMe, and q⁷ is 1; with two phosphorothioate internucleotide linkage modifications within position 1-5 of the sense strand (counting from the 5′-end), and two phosphorothioate internucleotide linkage modifications at positions 1 and 2 and two phosphorothioate internucleotide linkage modifications within positions 18-23 of the antisense strand (counting from the 5′-end). The RNAi agent also comprises a 5′-PS and a targeting ligand. In one embodiment, the 5′-PS is at the 5′-end of the antisense strand, and the targeting ligand is at the 3′-end of the sense strand.

[0397] In one embodiment, B1 is 2′-OMe or 2′-F, n¹ is 8, T1 is 2′F, n² is 3, B2 is 2′-OMe, n³ is 7, n⁴ is 0, B3 is 2′-OMe, n⁵ is 3, B1′ is 2′-OMe or 2′-F, q¹ is 9, T1′ is 2′-F, q² is 1, B2′ is 2′-OMe or 2′-F, q³ is 4, q⁴ is 0, B3′ is 2′-OMe or 2′-F, q⁵ is 7, T3′ is 2′-F, q⁶ is 1, B4′ is 2′-OMe, and q⁷ is 1; with two phosphorothioate internucleotide linkage modifications within position 1-5 of the sense strand (counting from the 5′-end), and two phosphorothioate internucleotide linkage modifications at positions 1 and 2 and two phosphorothioate internucleotide linkage modifications within positions 18-23 of the antisense strand (counting from the 5′-end). The RNAi agent also comprises a 5′-VP (e.g., a 5′-E-VP, 5′-Z-VP, or combination thereof) and a targeting ligand. In one embodiment, the 5′-VP is at the 5′-end of the antisense strand, and the targeting ligand is at the 3′-end of the sense strand.

[0398] In one embodiment, B1 is 2′-OMe or 2′-F, n¹ is 8, T1 is 2′F, n² is 3, B2 is 2′-OMe, n³ is 7, n⁴ is 0, B3 is 2′-OMe, n⁵ is 3, B1′ is 2′-OMe or 2′-F, q¹ is 9, T1′ is 2′-F, q² is 1, B2′ is 2′-OMe or 2′-F, q³ is 4, q⁴ is 0, B3′ is 2′-OMe or 2′-F, q⁵ is 7, T3′ is 2′-F, q⁶ is 1, B4′ is 2′-OMe, and q⁷ is 1; with two phosphorothioate internucleotide linkage modifications within position 1-5 of the sense strand (counting from the 5′-end), and two phosphorothioate internucleotide linkage modifications at positions 1 and 2 and two phosphorothioate internucleotide linkage modifications within positions 18-23 of the antisense strand (counting from the 5′-end). The RNAi agent also comprises a 5′-PS₂ and a targeting ligand. In one embodiment, the 5′-PS₂ is at the 5′-end of the antisense strand, and the targeting ligand is at the 3′-end of the sense strand.

[0399] In one embodiment, B1 is 2′-OMe or 2′-F, n¹ is 8, T1 is 2′F, n² is 3, B2 is 2′-OMe, n³ is 7, n⁴ is 0, B3 is 2′-OMe, n⁵ is 3, B1′ is 2′-OMe or 2′-F, q¹ is 9, T1′ is 2′-F, q² is 1, B2′ is 2′-OMe or 2′-F, q³ is 4, q⁴ is 0, B3′ is 2′-OMe or 2′-F, q⁵ is 7, T3′ is 2′-F, q⁶ is 1, B4′ is 2′-OMe, and q⁷ is 1; with two phosphorothioate internucleotide linkage modifications within position 1-5 of the sense strand (counting from the 5′-end), and two phosphorothioate internucleotide linkage modifications at positions 1 and 2 and two phosphorothioate internucleotide linkage modifications within positions 18-23 of the antisense strand (counting from the 5′-end). The RNAi agent also comprises a 5′-deoxy-5′-C-malonyl and a targeting ligand. In one embodiment, the 5′-deoxy-5′-C-malonyl is at the 5′-end of the antisense strand, and the targeting ligand is at the 3′-end of the sense strand.

[0400] In one embodiment, B1 is 2′-OMe or 2′-F, n¹ is 8, T1 is 2′F, n² is 3, B2 is 2′-OMe, n³ is 7, n⁴ is 0, B3 is 2′-OMe, n⁵ is 3, B1′ is 2′-OMe or 2′-F, q¹ is 9, T1′ is 2′-F, q² is 1, B2′ is 2′-OMe or 2′-F, q³ is 4, T2′ is 2′-F, q⁴ is 2, B3′ is 2′-OMe or 2′-F, q⁵ is 5, T3′ is 2′-F, q⁶ is 1, B4′ is 2′-F, and q⁷ is 1; with two phosphorothioate internucleotide linkage modifications within position 1-5 of the sense strand (counting from the 5′-end of the sense strand), and two phosphorothioate internucleotide linkage modifications at positions 1 and 2 and two phosphorothioate internucleotide linkage modifications within positions 18-23 of the antisense strand (counting from the 5′-end of the antisense strand). The RNAi agent also comprises a 5′-P and a targeting ligand. In one embodiment, the 5′-P is at the 5′-end of the antisense strand, and the targeting ligand is at the 3′-end of the sense strand.

[0401] In one embodiment, B1 is 2′-OMe or 2′-F, n¹ is 8, T1 is 2′F, n² is 3, B2 is 2′-OMe, n³ is 7, n⁴ is 0, B3 is 2′-OMe, n⁵ is 3, B1′ is 2′-OMe or 2′-F, q¹ is 9, T1′ is 2′-F, q² is 1, B2′ is 2′-OMe or 2′-F, q³ is 4, T2′ is 2′-F, q⁴ is 2, B3′ is 2′-OMe or 2′-F, q⁵ is 5, T3′ is 2′-F, q⁶ is 1, B4′ is 2′-F, and q⁷ is 1; with two phosphorothioate internucleotide linkage modifications within position 1-5 of the sense strand (counting from the 5′-end of the sense strand), and two phosphorothioate internucleotide linkage modifications at positions 1 and 2 and two phosphorothioate internucleotide linkage modifications within positions 18-23 of the antisense strand (counting from the 5′-end of the antisense strand). The RNAi agent also comprises a 5′-PS and a targeting ligand. In one embodiment, the 5′-PS is at the 5′-end of the antisense strand, and the targeting ligand is at the 3′-end of the sense strand.

[0402] In one embodiment, B1 is 2′-OMe or 2′-F, n¹ is 8, T1 is 2′F, n² is 3, B2 is 2′-OMe, n³ is 7, n⁴ is 0, B3 is 2′-OMe, n⁵ is 3, B1′ is 2′-OMe or 2′-F, q¹ is 9, T1′ is 2′-F, q² is 1, B2′ is 2′-OMe or 2′-F, q³ is 4, T2′ is 2′-F, q⁴ is 2, B3′ is 2′-OMe or 2′-F, q⁵ is 5, T3′ is 2′-F, q⁶ is 1, B4′ is 2′-F, and q⁷ is 1; with two phosphorothioate internucleotide linkage modifications within position 1-5 of the sense strand (counting from the 5′-end of the sense strand), and two phosphorothioate internucleotide linkage modifications at positions 1 and 2 and two phosphorothioate internucleotide linkage modifications within positions 18-23 of the antisense strand (counting from the 5′-end of the antisense strand). The RNAi agent also comprises a 5′-VP (e.g., a 5′-E-VP, 5′-Z-VP, or combination thereof) and a targeting ligand. In one embodiment, the 5′-VP is at the 5′-end of the antisense strand, and the targeting ligand is at the 3′-end of the sense strand.

[0403] In one embodiment, B1 is 2′-OMe or 2′-F, n¹ is 8, T1 is 2′F, n² is 3, B2 is 2′-OMe, n³ is 7, n⁴ is 0, B3 is 2′-OMe, n⁵ is 3, B1′ is 2′-OMe or 2′-F, q¹ is 9, T1′ is 2′-F, q² is 1, B2′ is 2′-OMe or 2′-F, q³ is 4, T2′ is 2′-F, q⁴ is 2, B3′ is 2′-OMe or 2′-F, q⁵ is 5, T3′ is 2′-F, q⁶ is 1, B4′ is 2′-F, and q⁷ is 1; with two phosphorothioate internucleotide linkage modifications within position 1-5 of the sense strand (counting from the 5′-end of the sense strand), and two phosphorothioate internucleotide linkage modifications at positions 1 and 2 and two phosphorothioate internucleotide linkage modifications within positions 18-23 of the antisense strand (counting from the 5′-end of the antisense strand). The RNAi agent also comprises a 5′-PS₂ and a targeting ligand. In one embodiment, the 5′-PS₂ is at the 5′-end of the antisense strand, and the targeting ligand is at the 3′-end of the sense strand.

[0404] In one embodiment, B1 is 2′-OMe or 2′-F, n¹ is 8, T1 is 2′F, n² is 3, B2 is 2′-OMe, n³ is 7, n⁴ is 0, B3 is 2′-OMe, n⁵ is 3, B1′ is 2′-OMe or 2′-F, q¹ is 9, T1′ is 2′-F, q² is 1, B2′ is 2′-OMe or 2′-F, q³ is 4, T2′ is 2′-F, q⁴ is 2, B3′ is 2′-OMe or 2′-F, q⁵ is 5, T3′ is 2′-F, q⁶ is 1, B4′ is 2′-F, and q⁷ is 1; with two phosphorothioate internucleotide linkage modifications within position 1-5 of the sense strand (counting from the 5′-end of the sense strand), and two phosphorothioate internucleotide linkage modifications at positions 1 and 2 and two phosphorothioate internucleotide linkage modifications within positions 18-23 of the antisense strand (counting from the 5′-end of the antisense strand). The RNAi agent also comprises a 5′-deoxy-5′-C-malonyl and a targeting ligand. In one embodiment, the 5′-deoxy-5′-C-malonyl is at the 5′-end of the antisense strand, and the targeting ligand is at the 3′-end of the sense strand.

[0405] In one embodiment, B1 is 2′-OMe or 2′-F, n¹ is 8, T1 is 2′F, n² is 3, B2 is 2′-OMe, n³ is 7, n⁴ is 0, B3 is 2′-OMe, n⁵ is 3, B1′ is 2′-OMe or 2′-F, q¹ is 9, T1′ is 2′-F, q² is 1, B2′ is 2′-OMe or 2′-F, q³ is 4, q⁴ is 0, B3′ is 2′-OMe or 2′-F, q⁵ is 7, T3′ is 2′-F, q⁶ is 1, B4′ is 2′-F, and q⁷ is 1; with two phosphorothioate internucleotide linkage modifications within position 1-5 of the sense strand (counting from the 5′-end of the sense strand), and two phosphorothioate internucleotide linkage modifications at positions 1 and 2 and two phosphorothioate internucleotide linkage modifications within positions 18-23 of the antisense strand (counting from the 5′-end of the antisense strand). The RNAi agent also comprises a 5′-P and a targeting ligand. In one embodiment, the 5′-P is at the 5′-end of the antisense strand, and the targeting ligand is at the 3′-end of the sense strand.

[0406] In one embodiment, B1 is 2′-OMe or 2′-F, n¹ is 8, T1 is 2′F, n² is 3, B2 is 2′-OMe, n³ is 7, n⁴ is 0, B3 is 2′-OMe, n⁵ is 3, B1′ is 2′-OMe or 2′-F, q¹ is 9, T1′ is 2′-F, q² is 1, B2′ is 2′-OMe or 2′-F, q³ is 4, q⁴ is 0, B3′ is 2′-OMe or 2′-F, q⁵ is 7, T3′ is 2′-F, q⁶ is 1, B4′ is 2′-F, and q⁷ is 1; with two phosphorothioate internucleotide linkage modifications within position 1-5 of the sense strand (counting from the 5′-end of the sense strand), and two phosphorothioate internucleotide linkage modifications at positions 1 and 2 and two phosphorothioate internucleotide linkage modifications within positions 18-23 of the antisense strand (counting from the 5′-end of the antisense strand). The RNAi agent also comprises a 5′-PS and a targeting ligand. In one embodiment, the 5′-PS is at the 5′-end of the antisense strand, and the targeting ligand is at the 3′-end of the sense strand.

[0407] In one embodiment, B1 is 2′-OMe or 2′-F, n¹ is 8, T1 is 2′F, n² is 3, B2 is 2′-OMe, n³ is 7, n⁴ is 0, B3 is 2′-OMe, n⁵ is 3, B1′ is 2′-OMe or 2′-F, q¹ is 9, T1′ is 2′-F, q² is 1, B2′ is 2′-OMe or 2′-F, q³ is 4, q⁴ is 0, B3′ is 2′-OMe or 2′-F, q⁵ is 7, T3′ is 2′-F, q⁶ is 1, B4′ is 2′-F, and q⁷ is 1; with two phosphorothioate internucleotide linkage modifications within position 1-5 of the sense strand (counting from the 5′-end of the sense strand), and two phosphorothioate internucleotide linkage modifications at positions 1 and 2 and two phosphorothioate internucleotide linkage modifications within positions 18-23 of the antisense strand (counting from the 5′-end of the antisense strand). The RNAi agent also comprises a 5′-VP (e.g., a 5′-E-VP, 5′-Z-VP, or combination thereof) and a targeting ligand. In one embodiment, the 5′-VP is at the 5′-end of the antisense strand, and the targeting ligand is at the 3′-end of the sense strand.

[0408] In one embodiment, B1 is 2′-OMe or 2′-F, n¹ is 8, T1 is 2′F, n² is 3, B2 is 2′-OMe, n³ is 7, n⁴ is 0, B3 is 2′-OMe, n⁵ is 3, B1′ is 2′-OMe or 2′-F, q¹ is 9, T1′ is 2′-F, q² is 1, B2′ is 2′-OMe or 2′-F, q³ is 4, q⁴ is 0, B3′ is 2′-OMe or 2′-F, q⁵ is 7, T3′ is 2′-F, q⁶ is 1, B4′ is 2′-F, and q⁷ is 1; with two phosphorothioate internucleotide linkage modifications within position 1-5 of the sense strand (counting from the 5′-end of the sense strand), and two phosphorothioate internucleotide linkage modifications at positions 1 and 2 and two phosphorothioate internucleotide linkage modifications within positions 18-23 of the antisense strand (counting from the 5′-end of the antisense strand). The RNAi agent also comprises a 5′-PS₂ and a targeting ligand. In one embodiment, the 5′-PS₂ is at the 5′-end of the antisense strand, and the targeting ligand is at the 3′-end of the sense strand.

[0409] In one embodiment, B1 is 2′-OMe or 2′-F, n¹ is 8, T1 is 2′F, n² is 3, B2 is 2′-OMe, n³ is 7, n⁴ is 0, B3 is 2′-OMe, n⁵ is 3, B1′ is 2′-OMe or 2′-F, q¹ is 9, T1′ is 2′-F, q² is 1, B2′ is 2′-OMe or 2′-F, q³ is 4, q⁴ is 0, B3′ is 2′-OMe or 2′-F, q⁵ is 7, T3′ is 2′-F, q⁶ is 1, B4′ is 2′-F, and q⁷ is 1; with two phosphorothioate internucleotide linkage modifications within position 1-5 of the sense strand (counting from the 5′-end of the sense strand), and two phosphorothioate internucleotide linkage modifications at positions 1 and 2 and two phosphorothioate internucleotide linkage modifications within positions 18-23 of the antisense strand (counting from the 5′-end of the antisense strand). The RNAi agent also comprises a 5′-deoxy-5′-C-malonyl and a targeting ligand. In one embodiment, the 5′-deoxy-5′-C-malonyl is at the 5′-end of the antisense strand, and the targeting ligand is at the 3′-end of the sense strand.

[0410] In a particular embodiment, an RNAi agent of the present invention comprises:
[0411] (a) a sense strand having:
   [0412] (i) a length of 21 nucleotides;
   [0413] (ii) an ASGPR ligand attached to the 3′-end, wherein said ASGPR ligand comprises three GalNAc derivatives attached through a trivalent branched linker; and
   [0414] (iii) 2′-F modifications at positions 1, 3, 5, 7, 9 to 11, 13, 17, 19, and 21, and 2′-OMe modifications at positions 2, 4, 6, 8, 12, 14 to 16, 18, and 20 (counting from the 5′ end);
[0415] and
[0416] (b) an antisense strand having:
   [0417] (i) a length of 23 nucleotides;
   [0418] (ii) 2′-OMe modifications at positions 1, 3, 5, 9, 11 to 13, 15, 17, 19, 21, and 23, and 2′F modifications at positions 2, 4, 6 to 8, 10, 14, 16, 18, 20, and 22 (counting from the 5′ end); and
   [0419] (iii) phosphorothioate internucleotide linkages between nucleotide positions 21 and 22, and between nucleotide positions 22 and 23 (counting from the 5′ end);
[0420] wherein the dsRNA agents have a two nucleotide overhang at the 3′-end of the antisense strand, and a blunt end at the 5′-end of the antisense strand.

[0421] In another particular embodiment, an RNAi agent of the present invention comprises:
[0422] (a) a sense strand having:
   [0423] (i) a length of 21 nucleotides;
   [0424] (ii) an ASGPR ligand attached to the 3′-end, wherein said ASGPR ligand comprises three GalNAc derivatives attached through a trivalent branched linker;
   [0425] (iii) 2′-F modifications at positions 1, 3, 5, 7, 9 to 11, 13, 15, 17, 19, and 21, and 2′-OMe modifications at positions 2, 4, 6, 8, 12, 14, 16, 18, and 20 (counting from the 5′ end); and
   [0426] (iv) phosphorothioate internucleotide linkages between nucleotide positions 1 and 2, and between nucleotide positions 2 and 3 (counting from the 5′ end);
[0427] and
[0428] (b) an antisense strand having:
   [0429] (i) a length of 23 nucleotides;
   [0430] (ii) 2′-OMe modifications at positions 1, 3, 5, 7, 9, 11 to 13, 15, 17, 19, and 21 to 23, and 2′F modifications at positions 2, 4, 6, 8, 10, 14, 16, 18, and 20 (counting from the 5′ end); and
   [0431] (iii) phosphorothioate internucleotide linkages between nucleotide positions 1 and 2, between nucleotide positions 2 and 3, between nucleotide positions 21 and 22, and between nucleotide positions 22 and 23 (counting from the 5′ end);
      wherein the RNAi agents have a two nucleotide overhang at the 3′-end of the antisense strand, and a blunt end at the 5′-end of the antisense strand.

[0432] In another particular embodiment, a RNAi agent of the present invention comprises:
[0433] (a) a sense strand having:
   [0434] (i) a length of 21 nucleotides;
   [0435] (ii) an ASGPR ligand attached to the 3′-end, wherein said ASGPR ligand comprises three GalNAc derivatives attached through a trivalent branched linker;
   [0436] (iii) 2′-OMe modifications at positions 1 to 6, 8, 10, and 12 to 21, 2′-F modifications at positions 7, and 9, and a deoxy-nucleotide (e.g. dT) at position 11 (counting from the 5′ end); and
   [0437] (iv) phosphorothioate internucleotide linkages between nucleotide positions 1 and 2, and between nucleotide positions 2 and 3 (counting from the 5′ end);
[0438] and
[0439] (b) an antisense strand having:
   [0440] (i) a length of 23 nucleotides;
   [0441] (ii) 2′-OMe modifications at positions 1, 3, 7, 9, 11, 13, 15, 17, and 19 to 23, and 2′-F modifications at positions 2, 4 to 6, 8, 10, 12, 14, 16, and 18 (counting from the 5′ end); and
   [0442] (iii) phosphorothioate internucleotide linkages between nucleotide positions 1 and 2, between nucleotide positions 2 and 3, between nucleotide positions 21 and 22, and between nucleotide positions 22 and 23 (counting from the 5′ end);
      wherein the RNAi agents have a two nucleotide overhang at the 3′-end of the antisense strand, and a blunt end at the 5′-end of the antisense strand.

[0443] In another particular embodiment, a RNAi agent of the present invention comprises:
[0444] (a) a sense strand having:
   [0445] (i) a length of 21 nucleotides;
   [0446] (ii) an ASGPR ligand attached to the 3′-end, wherein said ASGPR ligand comprises three GalNAc derivatives attached through a trivalent branched linker;
   [0447] (iii) 2′-OMe modifications at positions 1 to 6, 8, 10, 12, 14, and 16 to 21, and 2′-F modifications at positions 7, 9, 11, 13, and 15; and
   [0448] (iv) phosphorothioate internucleotide linkages between nucleotide positions 1 and 2, and between nucleotide positions 2 and 3 (counting from the 5′ end);
[0449] and
[0450] (b) an antisense strand having:
   [0451] (i) a length of 23 nucleotides;
   [0452] (ii) 2′-OMe modifications at positions 1, 5, 7, 9, 11, 13, 15, 17, 19, and 21 to 23, and 2′-F modifications at positions 2 to 4, 6, 8, 10, 12, 14, 16, 18, and 20 (counting from the 5′ end); and
   [0453] (iii) phosphorothioate internucleotide linkages between nucleotide positions 1 and 2, between nucleotide positions 2 and 3, between nucleotide positions 21 and 22, and between nucleotide positions 22 and 23 (counting from the 5′ end);
      wherein the RNAi agents have a two nucleotide overhang at the 3′-end of the antisense strand, and a blunt end at the 5′-end of the antisense strand.

[0454] In another particular embodiment, a RNAi agent of the present invention comprises:
[0455] (a) a sense strand having:
   [0456] (i) a length of 21 nucleotides;
   [0457] (ii) an ASGPR ligand attached to the 3′-end, wherein said ASGPR ligand comprises three GalNAc derivatives attached through a trivalent branched linker;
   [0458] (iii) 2′-OMe modifications at positions 1 to 9, and 12 to 21, and 2′-F modifications at positions 10, and 11; and
   [0459] (iv) phosphorothioate internucleotide linkages between nucleotide positions 1 and 2, and between nucleotide positions 2 and 3 (counting from the 5′ end);
[0460] and
[0461] (b) an antisense strand having:
   [0462] (i) a length of 23 nucleotides;
   [0463] (ii) 2′-OMe modifications at positions 1, 3, 5, 7, 9, 11 to 13, 15, 17, 19, and 21 to 23, and 2′-F modifications at positions 2, 4, 6, 8, 10, 14, 16, 18, and 20 (counting from the 5′ end); and
   [0464] (iii) phosphorothioate internucleotide linkages between nucleotide positions 1 and 2, between nucleotide positions 2 and 3, between nucleotide positions 21 and 22, and between nucleotide positions 22 and 23 (counting from the 5′ end);
      wherein the RNAi agents have a two nucleotide overhang at the 3′-end of the antisense strand, and a blunt end at the 5′-end of the antisense strand.

[0465] In another particular embodiment, a RNAi agent of the present invention comprises:
[0466] (a) a sense strand having:
   [0467] (i) a length of 21 nucleotides;
   [0468] (ii) an ASGPR ligand attached to the 3′-end, wherein said ASGPR ligand comprises three GalNAc derivatives attached through a trivalent branched linker;
   [0469] (iii) 2′-F modifications at positions 1, 3, 5, 7, 9 to 11, and 13, and 2′-OMe modifications at positions 2, 4, 6, 8, 12, and 14 to 21; and
[0470] (iv) phosphorothioate internucleotide linkages between nucleotide positions 1 and 2, and between nucleotide positions 2 and 3 (counting from the 5′ end);
[0471] and
[0472] (b) an antisense strand having:
   [0473] (i) a length of 23 nucleotides;
   [0474] (ii) 2′-OMe modifications at positions 1, 3, 5 to 7, 9, 11 to 13, 15, 17 to 19, and 21 to 23, and 2′-F modifications at positions 2, 4, 8, 10, 14, 16, and 20 (counting from the 5′ end); and
   [0475] (iii) phosphorothioate internucleotide linkages between nucleotide positions 1 and 2, between nucleotide positions 2 and 3, between nucleotide positions 21 and 22, and between nucleotide positions 22 and 23 (counting from the 5′ end);
      wherein the RNAi agents have a two nucleotide overhang at the 3′-end of the antisense strand, and a blunt end at the 5′-end of the antisense strand.

[0476] In another particular embodiment, a RNAi agent of the present invention comprises:
[0477] (a) a sense strand having:
   [0478] (i) a length of 21 nucleotides;
   [0479] (ii) an ASGPR ligand attached to the 3′-end, wherein said ASGPR ligand comprises three GalNAc derivatives attached through a trivalent branched linker;
   [0480] (iii) 2′-OMe modifications at positions 1, 2, 4, 6, 8, 12, 14, 15, 17, and 19 to 21, and 2′-F modifications at positions 3, 5, 7, 9 to 11, 13, 16, and 18; and
   [0481] (iv) phosphorothioate internucleotide linkages between nucleotide positions 1 and 2, and between nucleotide positions 2 and 3 (counting from the 5′ end);
[0482] and
[0483] (b) an antisense strand having:
   [0484] (i) a length of 25 nucleotides;
   [0485] (ii) 2′-OMe modifications at positions 1, 4, 6, 7, 9, 11 to 13, 15, 17, and 19 to 23, 2′-F modifications at positions 2, 3, 5, 8, 10, 14, 16, and 18, and desoxy-nucleotides (e.g. dT) at positions 24 and 25 (counting from the 5′ end); and
   [0486] (iii) phosphorothioate internucleotide linkages between nucleotide positions 1 and 2, between nucleotide positions 2 and 3, between nucleotide positions 21 and 22, and between nucleotide positions 22 and 23 (counting from the 5′ end);
      wherein the RNAi agents have a four nucleotide overhang at the 3′-end of the antisense strand, and a blunt end at the 5′-end of the antisense strand.

[0487] In another particular embodiment, a RNAi agent of the present invention comprises:
[0488] (a) a sense strand having:
   [0489] (i) a length of 21 nucleotides;
   [0490] (ii) an ASGPR ligand attached to the 3′-end, wherein said ASGPR ligand comprises three GalNAc derivatives attached through a trivalent branched linker;
   [0491] (iii) 2′-OMe modifications at positions 1 to 6, 8, and 12 to 21, and 2′-F modifications at positions 7, and 9 to 11; and
   [0492] (iv) phosphorothioate internucleotide linkages between nucleotide positions 1 and 2, and between nucleotide positions 2 and 3 (counting from the 5′ end);
[0493] and
[0494] (b) an antisense strand having:
   [0495] (i) a length of 23 nucleotides;
   [0496] (ii) 2′-OMe modifications at positions 1, 3 to 5, 7, 8, 10 to 13, 15, and 17 to 23, and 2′-F modifications at positions 2, 6, 9, 14, and 16 (counting from the 5′ end); and
   [0497] (iii) phosphorothioate internucleotide linkages between nucleotide positions 1 and 2, between nucleotide positions 2 and 3, between nucleotide positions 21 and 22, and between nucleotide positions 22 and 23 (counting from the 5′ end);
      wherein the RNAi agents have a two nucleotide overhang at the 3′-end of the antisense strand, and a blunt end at the 5′-end of the antisense strand.

[0498] In another particular embodiment, a RNAi agent of the present invention comprises:
[0499] (a) a sense strand having:
   [0500] (i) a length of 21 nucleotides;
   [0501] (ii) an ASGPR ligand attached to the 3′-end, wherein said ASGPR ligand comprises three GalNAc derivatives attached through a trivalent branched linker;
   [0502] (iii) 2′-OMe modifications at positions 1 to 6, 8, and 12 to 21, and 2′-F modifications at positions 7, and 9 to 11; and
   [0503] (iv) phosphorothioate internucleotide linkages between nucleotide positions 1 and 2, and between nucleotide positions 2 and 3 (counting from the 5′ end);
[0504] and
[0505] (b) an antisense strand having:
   [0506] (i) a length of 23 nucleotides;
   [0507] (ii) 2′-OMe modifications at positions 1, 3 to 5, 7, 10 to 13, 15, and 17 to 23, and 2′-F modifications at positions 2, 6, 8, 9, 14, and 16 (counting from the 5′ end); and
   [0508] (iii) phosphorothioate internucleotide linkages between nucleotide positions 1 and 2, between nucleotide positions 2 and 3, between nucleotide positions 21 and 22, and between nucleotide positions 22 and 23 (counting from the 5′ end);
      wherein the RNAi agents have a two nucleotide overhang at the 3′-end of the antisense strand, and a blunt end at the 5′-end of the antisense strand.

[0509] In another particular embodiment, a RNAi agent of the present invention comprises:
[0510] (a) a sense strand having:
   [0511] (i) a length of 19 nucleotides;
   [0512] (ii) an ASGPR ligand attached to the 3′-end, wherein said ASGPR ligand comprises three GalNAc derivatives attached through a trivalent branched linker;
   [0513] (iii) 2′-OMe modifications at positions 1 to 4, 6, and 10 to 19, and 2′-F modifications at positions 5, and 7 to 9; and
   [0514] (iv) phosphorothioate internucleotide linkages between nucleotide positions 1 and 2, and between nucleotide positions 2 and 3 (counting from the 5′ end);
[0515] and
[0516] (b) an antisense strand having:
   [0517] (i) a length of 21 nucleotides;
   [0518] (ii) 2′-OMe modifications at positions 1, 3 to 5, 7, 10 to 13, 15, and 17 to 21, and 2′-F modifications at positions 2, 6, 8, 9, 14, and 16 (counting from the 5′ end); and
   [0519] (iii) phosphorothioate internucleotide linkages between nucleotide positions 1 and 2, between nucleotide positions 2 and 3, between nucleotide positions 19 and 20, and between nucleotide positions 20 and 21 (counting from the 5′ end);
      wherein the RNAi agents have a two nucleotide overhang at the 3′-end of the antisense strand, and a blunt end at the 5′-end of the antisense strand.

[0520] In certain embodiments, the iRNA for use in the methods of the invention is an agent selected from agents listed in any one of Tables 2-3. These agents may further comprise a ligand.

### IV. iRNAs Conjugated to Ligands

[0521] Another modification of the RNA of an iRNA of the invention involves chemically linking to the iRNA one or more ligands, moieties or conjugates that enhance the activity, cellular distribution, or cellular uptake of the iRNA e.g., into a cell. Such moieties include but are not limited to lipid moieties such as a cholesterol moiety (Letsinger et al., Proc. Natl. Acid. Sci. USA, 1989, 86: 6553-6556). In other embodiments, the ligand is cholic acid (Manoharan et al., Biorg. Med. Chem. Let., 1994, 4:1053-1060), a thioether, e.g., beryl-S-tritylthiol (Manoharan et al., Ann. N.Y. Acad. Sci., 1992, 660:306-309; Manoharan et al., Biorg. Med. Chem. Let., 1993, 3:2765-2770), a thiocholesterol (Oberhauser et al., Nucl. Acids Res., 1992, 20:533-538), an aliphatic chain, e.g., dodecandiol or undecyl residues (Saison-Behmoaras et al., EMBO J, 1991, 10:1111-1118; Kabanov et al., FEBS Lett., 1990, 259:327-330; Svinarchuk et al., Biochimie, 1993, 75:49-54), a phospholipid, e.g., di-hexadecyl-rac-glycerol or triethyl-ammonium 1,2-di-O-hexadecyl-rac-glycero-3-phosphonate (Manoharan et al., Tetrahedron Lett., 1995, 36:3651-3654; Shea et al., Nucl. Acids Res., 1990, 18:3777-3783), a polyamine or a polyethylene glycol chain (Manoharan et al., Nucleosides & Nucleotides, 1995, 14:969-973), or adamantane acetic acid (Manoharan et al., Tetrahedron Lett., 1995, 36:3651-3654), a palmityl moiety (Mishra et al., Biochim. Biophys. Acta, 1995, 1264:229-237), or an octadecylamine or hexylamino-carbonyloxycholesterol moiety (Crooke et al., J. Pharmacol. Exp. Ther., 1996, 277:923-937).

[0522] In certain embodiments, a ligand alters the distribution, targeting, or lifetime of an iRNA agent into which it is incorporated. In preferred embodiments a ligand provides an enhanced affinity for a selected target, e.g., molecule, cell or cell type, compartment, e.g., a cellular or organ compartment, tissue, organ or region of the body, as, e.g., compared to a species absent such a ligand. Preferred ligands do not take part in duplex pairing in a duplexed nucleic acid.

[0523] Ligands can include a naturally occurring substance, such as a protein (e.g., human serum albumin (HSA), low-density lipoprotein (LDL), or globulin); carbohydrate (e.g., a dextran, pullulan, chitin, chitosan, inulin, cyclodextrin, N-acetylglucosamine, N-acetylgalactosamine, or hyaluronic acid); or a lipid. The ligand can also be a recombinant or synthetic molecule, such as a synthetic polymer, e.g., a synthetic polyamino acid. Examples of polyamino acids include polyamino acid is a polylysine (PLL), poly L-aspartic acid, poly L-glutamic acid, styrene-maleic acid anhydride copolymer, poly(L-lactide-co-glycolied) copolymer, divinyl ether-maleic anhydride copolymer, N-(2-hydroxypropyl)methacrylamide copolymer (HMPA), polyethylene glycol (PEG), polyvinyl alcohol (PVA), polyurethane, poly(2-ethylacryllic acid), N-isopropylacrylamide polymers, or polyphosphazine. Example of polyamines include: polyethylenimine, polylysine (PLL), spermine, spermidine, polyamine, pseudopeptide-polyamine, peptidomimetic polyamine, dendrimer polyamine, arginine, amidine, protamine, cationic lipid, cationic porphyrin, quaternary salt of a polyamine, or an alpha helical peptide.

[0524] Ligands can also include targeting groups, e.g., a cell or tissue targeting agent, e.g., a lectin, glycoprotein, lipid or protein, e.g., an antibody, that binds to a specified cell type such as a kidney cell. A targeting group can be a thyrotropin, melanotropin, lectin, glycoprotein, surfactant protein A, Mucin carbohydrate, multivalent lactose, multivalent galactose, N-acetyl-galactosamine, N-acetyl-glucosamine multivalent mannose, multivalent fucose, glycosylated polyaminoacids, multivalent galactose, transferrin, bisphosphonate, polyglutamate, polyaspartate, a lipid, cholesterol, a steroid, bile acid, folate, vitamin B12, vitamin A, biotin, or an RGD peptide or RGD peptide mimetic. In certain embodiments, the ligand is a multivalent galactose, e.g., an N-acetyl-galactosamine.

[0525] Other examples of ligands include dyes, intercalating agents (e.g. acridines), cross-linkers (e.g. psoralene, mitomycin C), porphyrins (TPPC4, texaphyrin, Sapphyrin), polycyclic aromatic hydrocarbons (e.g., phenazine, dihydrophenazine), artificial endonucleases (e.g. EDTA), lipophilic molecules, e.g., cholesterol, cholic acid, adamantane acetic acid, 1-pyrene butyric acid, dihydrotestosterone, 1,3-Bis-O(hexadecyl)glycerol, geranyloxyhexyl group, hexadecylglycerol, borneol, menthol, 1,3-propanediol, heptadecyl group, palmitic acid, myristic acid, O3-(oleoyl)lithocholic acid, O3-(oleoyl)cholenic acid, dimethoxytrityl, or phenoxazine) and peptide conjugates (e.g., antennapedia peptide, Tat peptide), alkylating agents, phosphate, amino, mercapto, PEG (e.g., PEG-40K), MPEG, [MPEG]₂, polyamino, alkyl, substituted alkyl, radiolabeled markers, enzymes, haptens (e.g. biotin), transport/absorption facilitators (e.g., aspirin, vitamin E, folic acid), synthetic ribonucleases (e.g., imidazole, bisimidazole, histamine, imidazole clusters, acridine-imidazole conjugates, Eu3+ complexes of tetraazamacrocycles), dinitrophenyl, HRP, or AP.

[0526] Ligands can be proteins, e.g., glycoproteins, or peptides, e.g., molecules having a specific affinity for a co-ligand, or antibodies e.g., an antibody, that binds to a specified cell type such as a hepatic cell. Ligands can also include hormones and hormone receptors. They can also include non-peptidic species, such as lipids, lectins, carbohydrates, vitamins, cofactors, multivalent lactose, multivalent galactose, N-acetyl-galactosamine, N-acetyl-glucosamine multivalent mannose, or multivalent fucose. The ligand can be, for example, a lipopolysaccharide, an activator of p38 MAP kinase, or an activator of NF-κB.

[0527] The ligand can be a substance, e.g., a drug, which can increase the uptake of the iRNA agent into the cell, for example, by disrupting the cell's cytoskeleton, e.g., by disrupting the cell's microtubules, microfilaments, or intermediate filaments. The drug can be, for example, taxol, vincristine, vinblastine, cytochalasin, nocodazole, japlakinolide, latrunculin A, phalloidin, swinholide A, indanocine, or myoservin.

[0528] In some embodiments, a ligand attached to an iRNA as described herein acts as a pharmacokinetic modulator (PK modulator). PK modulators include lipophiles, bile acids, steroids, phospholipid analogues, peptides, protein binding agents, PEG, vitamins, etc. Exemplary PK modulators include, but are not limited to, cholesterol, fatty acids, cholic acid, lithocholic acid, dialkylglycerides, diacylglyceride, phospholipids, sphingolipids, naproxen, ibuprofen, vitamin E, biotin. Oligonucleotides that comprise a number of phosphorothioate linkages are also known to bind to serum protein, thus short oligonucleotides, e.g., oligonucleotides of about 5 bases, 10 bases, 15 bases, or 20 bases, comprising multiple of phosphorothioate linkages in the backbone are also amenable to the present invention as ligands (e.g. as PK modulating ligands). In addition, aptamers that bind serum components (e.g. serum proteins) are also suitable for use as PK modulating ligands in the embodiments described herein.

[0529] Ligand-conjugated iRNAs of the invention may be synthesized by the use of an oligonucleotide that bears a pendant reactive functionality, such as that derived from the attachment of a linking molecule onto the oligonucleotide (described below). This reactive oligonucleotide may be reacted directly with commercially-available ligands, ligands that are synthesized bearing any of a variety of protecting groups, or ligands that have a linking moiety attached thereto.

[0530] The oligonucleotides used in the conjugates of the present invention may be conveniently and routinely made through the well-known technique of solid-phase synthesis. Equipment for such synthesis is sold by several vendors including, for example, Applied Biosystems® (Foster City, Calif.). Any other methods for such synthesis known in the art may additionally or alternatively be employed. It is also known to use similar techniques to prepare other oligonucleotides, such as the phosphorothioates and alkylated derivatives.

[0531] In the ligand-conjugated iRNAs and ligand-molecule bearing sequence-specific linked nucleosides of the present invention, the oligonucleotides and oligonucleosides may be assembled on a suitable DNA synthesizer utilizing standard nucleotide or nucleoside precursors, or nucleotide or nucleoside conjugate precursors that already bear the linking moiety, ligand-nucleotide or nucleoside-conjugate precursors that already bear the ligand molecule, or non-nucleoside ligand-bearing building blocks.

[0532] When using nucleotide-conjugate precursors that already bear a linking moiety, the synthesis of the sequence-specific linked nucleosides is typically completed, and the ligand molecule is then reacted with the linking moiety to form the ligand-conjugated oligonucleotide. In some embodiments, the oligonucleotides or linked nucleosides of the present invention are synthesized by an automated synthesizer using phosphoramidites derived from ligand-nucleoside conjugates in addition to the standard phosphoramidites and non-standard phosphoramidites that are commercially available and routinely used in oligonucleotide synthesis.

[0533] A. Lipid Conjugates

[0534] In certain embodiments, the ligand or conjugate is a lipid or lipid-based molecule. Such a lipid or lipid-based molecule preferably binds a serum protein, e.g., human serum albumin (HSA). An HSA binding ligand allows for distribution of the conjugate to a target tissue, e.g., a non-kidney target tissue of the body. For example, the target tissue can be the liver, including parenchymal cells of the liver. Other molecules that can bind HSA can also be used as ligands. For example, naproxen or aspirin can be used. A lipid or lipid-based ligand can (a) increase resistance to degradation of the conjugate, (b) increase targeting or transport into a target cell or cell membrane, or (c) can be used to adjust binding to a serum protein, e.g., HSA.

[0535] A lipid based ligand can be used to inhibit, e.g., control the binding of the conjugate to a target tissue. For example, a lipid or lipid-based ligand that binds to HSA more strongly will be less likely to be targeted to the kidney and therefore less likely to be cleared from the body. A lipid or lipid-based ligand that binds to HSA less strongly can be used to target the conjugate to the kidney.

[0536] In certain embodiments, the lipid based ligand binds HSA. Preferably, it binds HSA with a sufficient affinity such that the conjugate will be preferably distributed to a non-kidney tissue. However, it is preferred that the affinity not be so strong that the HSA-ligand binding cannot be reversed.

[0537] In other embodiments, the lipid based ligand binds HSA weakly or not at all, such that the conjugate will be preferably distributed to the kidney. Other moieties that target to kidney cells can also be used in place of, or in addition to, the lipid based ligand.

[0538] In another aspect, the ligand is a moiety, e.g., a vitamin, which is taken up by a target cell, e.g., a proliferating cell. These are particularly useful for treating disorders characterized by unwanted cell proliferation, e.g., of the malignant or non-malignant type, e.g., cancer cells. Exemplary vitamins include vitamin A, E, and K. Other exemplary vitamins include are B vitamin, e.g., folic acid, B12, riboflavin, biotin, pyridoxal or other vitamins or nutrients taken up by target cells such as liver cells. Also included are HSA and low density lipoprotein (LDL).

[0539] B. Cell Permeation Agents

[0540] In another aspect, the ligand is a cell-permeation agent, preferably a helical cell-permeation agent. Preferably, the agent is amphipathic. An exemplary agent is a peptide such as tat or antennopedia. If the agent is a peptide, it can be modified, including a peptidylmimetic, invertomers, non-peptide or pseudo-peptide linkages, and use of D-amino acids. The helical agent is preferably an alpha-helical agent, which preferably has a lipophilic and a lipophobic phase.

[0541] The ligand can be a peptide or peptidomimetic. A peptidomimetic (also referred to herein as an oligopeptidomimetic) is a molecule capable of folding into a defined three-dimensional structure similar to a natural peptide. The attachment of peptide and peptidomimetics to iRNA agents can affect pharmacokinetic distribution of the iRNA, such as by enhancing cellular recognition and absorption. The peptide or peptidomimetic moiety can be about 5-50 amino acids long, e.g., about 5, 10, 15, 20, 25, 30, 35, 40, 45, or 50 amino acids long.

[0542] A peptide or peptidomimetic can be, for example, a cell permeation peptide, cationic peptide, amphipathic peptide, or hydrophobic peptide (e.g., consisting primarily of Tyr, Trp, or Phe). The peptide moiety can be a dendrimer peptide, constrained peptide or crosslinked peptide. In another alternative, the peptide moiety can include a hydrophobic membrane translocation sequence (MTS). An exemplary hydrophobic MTS-containing peptide is RFGF having the amino acid sequence AAVALLPAVLLALLAP (SEQ ID NO: 9). An RFGF analogue (e.g., amino acid sequence AALLPVLLAAP (SEQ ID NO:10) containing a hydrophobic MTS can also be a targeting moiety. The peptide moiety can be a “delivery” peptide, which can carry large polar molecules including peptides, oligonucleotides, and protein across cell membranes. For example, sequences from the HIV Tat protein (GRKKRRQRRRPPQ (SEQ ID NO:11) and the Drosophila Antennapedia protein (RQIKIWFQNRRMKWKK (SEQ ID NO:12) have been found to be capable of functioning as delivery peptides. A peptide or peptidomimetic can be encoded by a random sequence of DNA, such as a peptide identified from a phage-display library, or one-bead-one-compound (OBOC) combinatorial library (Lam et al., Nature, 354:82-84, 1991). Examples of a peptide or peptidomimetic tethered to a dsRNA agent via an incorporated monomer unit for cell targeting purposes is an arginine-glycine-aspartic acid (RGD)-peptide, or RGD mimic. A peptide moiety can range in length from about 5 amino acids to about 40 amino acids. The peptide moieties can have a structural modification, such as to increase stability or direct conformational properties. Any of the structural modifications described below can be utilized.

[0543] An RGD peptide for use in the compositions and methods of the invention may be linear or cyclic, and may be modified, e.g., glycosylated or methylated, to facilitate targeting to a specific tissue(s). RGD-containing peptides and peptidiomimemtics may include D-amino acids, as well as synthetic RGD mimics. In addition to RGD, one can use other moieties that target the integrin ligand. Preferred conjugates of this ligand target PECAM-1 or VEGF.

[0544] A “cell permeation peptide” is capable of permeating a cell, e.g., a microbial cell, such as a bacterial or fungal cell, or a mammalian cell, such as a human cell. A microbial cell-permeating peptide can be, for example, an a-helical linear peptide (e.g., LL-37 or Ceropin P1), a disulfide bond-containing peptide (e.g., α-defensin, β-defensin or bactenecin), or a peptide containing only one or two dominating amino acids (e.g., PR-39 or indolicidin). A cell permeation peptide can also include a nuclear localization signal (NLS). For example, a cell permeation peptide can be a bipartite amphipathic peptide, such as MPG, which is derived from the fusion peptide domain of HIV-1 gp41 and the NLS of SV40 large T antigen (Simeoni et al., Nucl. Acids Res. 31:2717-2724, 2003).

[0545] C. Carbohydrate Conjugates

[0546] In some embodiments of the compositions and methods of the invention, an iRNA further comprises a carbohydrate. The carbohydrate conjugated iRNA is advantageous for the in vivo delivery of nucleic acids, as well as compositions suitable for in vivo therapeutic use, as described herein. As used herein, “carbohydrate” refers to a compound which is either a carbohydrate per se made up of one or more monosaccharide units having at least 6 carbon atoms (which can be linear, branched or cyclic) with an oxygen, nitrogen or sulfur atom bonded to each carbon atom; or a compound having as a part thereof a carbohydrate moiety made up of one or more monosaccharide units each having at least six carbon atoms (which can be linear, branched or cyclic), with an oxygen, nitrogen or sulfur atom bonded to each carbon atom. Representative carbohydrates include the sugars (mono-, di-, tri-, and oligosaccharides containing from about 4, 5, 6, 7, 8, or 9 monosaccharide units), and polysaccharides such as starches, glycogen, cellulose and polysaccharide gums. Specific monosaccharides include C5 and above (e.g., C5, C6, C7, or C8) sugars; di- and trisaccharides include sugars having two or three monosaccharide units (e.g., C5, C6, C7, or C8).

[0547] In certain embodiments, a carbohydrate conjugate for use in the compositions and methods of the invention is a monosaccharide.

[0548] In certain embodiments, the monosaccharide is an N-acetylgalactosamine (GalNAc). GalNAc conjugates, which comprise one or more N-acetylgalactosamine (GalNAc) derivatives, are described, for example, in U.S. Pat. No. 8,106,022, the entire content of which is hereby incorporated herein by reference. In some embodiments, the GalNAc conjugate serves as a ligand that targets the iRNA to particular cells. In some embodiments, the GalNAc conjugate targets the iRNA to liver cells, e.g., by serving as a ligand for the asialoglycoprotein receptor of liver cells (e.g., hepatocytes).

[0549] In some embodiments, the carbohydrate conjugate comprises one or more GalNAc derivatives. The GalNAc derivatives may be attached via a linker, e.g., a bivalent or trivalent branched linker. In some embodiments the GalNAc conjugate is conjugated to the 3′ end of the sense strand. In some embodiments, the GalNAc conjugate is conjugated to the iRNA agent (e.g., to the 3′ end of the sense strand) via a linker, e.g., a linker as described herein. In some embodiments the GalNAc conjugate is conjugated to the 5′ end of the sense strand. In some embodiments, the GalNAc conjugate is conjugated to the iRNA agent (e.g., to the 5′ end of the sense strand) via a linker, e.g., a linker as described herein.

[0550] In certain embodiments of the invention, the GalNAc or GalNAc derivative is attached to an iRNA agent of the invention via a monovalent linker. In some embodiments, the GalNAc or GalNAc derivative is attached to an iRNA agent of the invention via a bivalent linker. In yet other embodiments of the invention, the GalNAc or GalNAc derivative is attached to an iRNA agent of the invention via a trivalent linker. In other embodiments of the invention, the GalNAc or GalNAc derivative is attached to an iRNA agent of the invention via a tetravalent linker.

[0551] In certain embodiments, the double stranded RNAi agents of the invention comprise one GalNAc or GalNAc derivative attached to the iRNA agent. In certain embodiments, the double stranded RNAi agents of the invention comprise a plurality (e.g., 2, 3, 4, 5, or 6) GalNAc or GalNAc derivatives, each independently attached to a plurality of nucleotides of the double stranded RNAi agent through a plurality of monovalent linkers.

[0552] In some embodiments, for example, when the two strands of an iRNA agent of the invention are part of one larger molecule connected by an uninterrupted chain of nucleotides between the 3′-end of one strand and the 5′-end of the respective other strand forming a hairpin loop comprising, a plurality of unpaired nucleotides, each unpaired nucleotide within the hairpin loop may independently comprise a GalNAc or GalNAc derivative attached via a monovalent linker. The hairpin loop may also be formed by an extended overhang in one strand of the duplex.

[0553] In some embodiments, for example, when the two strands of an iRNA agent of the invention are part of one larger molecule connected by an uninterrupted chain of nucleotides between the 3′-end of one strand and the 5′-end of the respective other strand forming a hairpin loop comprising, a plurality of unpaired nucleotides, each unpaired nucleotide within the hairpin loop may independently comprise a GalNAc or GalNAc derivative attached via a monovalent linker. The hairpin loop may also be formed by an extended overhang in one strand of the duplex.

[0554] In one embodiment, a carbohydrate conjugate for use in the compositions and methods of the invention is selected from the group consisting of:

[chemical structure]

[chemical structure]

[chemical structure]

[chemical structure]

[chemical structure]

wherein Y is O or S and n is 3-6 (Formula XXIV);

[chemical structure]

wherein Y is O or S and n is 3-6 (Formula XXV);

[chemical structure]

wherein X is O or S (Formula XXVII);

[chemical structure]

[chemical structure]

[chemical structure]

[0555] In another embodiment, a carbohydrate conjugate for use in the compositions and methods of the invention is a monosaccharide. In one embodiment, the monosaccharide is an N-acetylgalactosamine, such as

[chemical structure]

[0556] In some embodiments, the RNAi agent is attached to the carbohydrate conjugate via a linker as shown in the following schematic, wherein X is O or S

[chemical structure]

[0557] In some embodiments, the RNAi agent is conjugated to L96 as defined in Table 1 and shown below:

[chemical structure]

[0558] Another representative carbohydrate conjugate for use in the embodiments described herein includes, but is not limited to,

[chemical structure]

(Formula XXXVI), when one of X or Y is an oligonucleotide, the other is a hydrogen.

[0559] In some embodiments, a suitable ligand is a ligand disclosed in WO 2019/055633, the entire contents of which are incorporated herein by reference. In one embodiment the ligand comprises the structure below:

[chemical structure]

[0560] In certain embodiments of the invention, the GalNAc or GalNAc derivative is attached to an iRNA agent of the invention via a monovalent linker. In some embodiments, the GalNAc or GalNAc derivative is attached to an iRNA agent of the invention via a bivalent linker. In yet other embodiments of the invention, the GalNAc or GalNAc derivative is attached to an iRNA agent of the invention via a trivalent linker.

[0561] In one embodiment, the double stranded RNAi agents of the invention comprise one or more GalNAc or GalNAc derivative attached to the iRNA agent. The GalNAc may be attached to any nucleotide via a linker on the sense strand or antsisense strand. The GalNac may be attached to the 5′-end of the sense strand, the 3′ end of the sense strand, the 5′-end of the antisense strand, or the 3′-end of the antisense strand. In one embodiment, the GalNAc is attached to the 3′ end of the sense strand, e.g., via a trivalent linker.

[0562] In other embodiments, the double stranded RNAi agents of the invention comprise a plurality (e.g., 2, 3, 4, 5, or 6) GalNAc or GalNAc derivatives, each independently attached to a plurality of nucleotides of the double stranded RNAi agent through a plurality of linkers, e.g., monovalent linkers.

[0563] In some embodiments, for example, when the two strands of an iRNA agent of the invention is part of one larger molecule connected by an uninterrupted chain of nucleotides between the 3′-end of one strand and the 5′-end of the respective other strand forming a hairpin loop comprising, a plurality of unpaired nucleotides, each unpaired nucleotide within the hairpin loop may independently comprise a GalNAc or GalNAc derivative attached via a monovalent linker.

[0564] In some embodiments, the carbohydrate conjugate further comprises one or more additional ligands as described above, such as, but not limited to, a PK modulator or a cell permeation peptide.

[0565] Additional carbohydrate conjugates and linkers suitable for use in the present invention include those described in PCT Publication Nos. WO 2014/179620 and WO 2014/179627, the entire contents of each of which are incorporated herein by reference.

[0566] D. Linkers

[0567] In some embodiments, the conjugate or ligand described herein can be attached to an iRNA oligonucleotide with various linkers that can be cleavable or non-cleavable.

[0568] The term “linker” or “linking group” means an organic moiety that connects two parts of a compound, e.g., covalently attaches two parts of a compound. Linkers typically comprise a direct bond or an atom such as oxygen or sulfur, a unit such as NR8, C(O), C(O)NH, SO, SO₂, SO₂NH or a chain of atoms, such as, but not limited to, substituted or unsubstituted alkyl, substituted or unsubstituted alkenyl, substituted or unsubstituted alkynyl, arylalkyl, arylalkenyl, arylalkynyl, heteroarylalkyl, heteroarylalkenyl, heteroarylalkynyl, heterocyclylalkyl, heterocyclylalkenyl, heterocyclylalkynyl, aryl, heteroaryl, heterocyclyl, cycloalkyl, cycloalkenyl, alkylarylalkyl, alkylarylalkenyl, alkylarylalkynyl, alkenylarylalkyl, alkenylarylalkenyl, alkenylarylalkynyl, alkynylarylalkyl, alkynylarylalkenyl, alkynylarylalkynyl, alkylheteroarylalkyl, alkylheteroarylalkenyl, alkylheteroarylalkynyl, alkenylheteroarylalkyl, alkenylheteroarylalkenyl, alkenylheteroarylalkynyl, alkynylheteroarylalkyl, alkynylheteroarylalkenyl, alkynylheteroarylalkynyl, alkylheterocyclylalkyl, alkylheterocyclylalkenyl, alkylhererocyclylalkynyl, alkenylheterocyclylalkyl, alkenylheterocyclylalkenyl, alkenylheterocyclylalkynyl, alkynylheterocyclylalkyl, alkynylheterocyclylalkenyl, alkynylheterocyclylalkynyl, alkylaryl, alkenylaryl, alkynylaryl, alkylheteroaryl, alkenylheteroaryl, alkynylhereroaryl, which one or more methylenes can be interrupted or terminated by 0, S, S(O), SO₂, N(R8), C(O), substituted or unsubstituted aryl, substituted or unsubstituted heteroaryl, or substituted or unsubstituted heterocyclic; where R8 is hydrogen, acyl, aliphatic, or substituted aliphatic. In one embodiment, the linker is about 1-24 atoms, 2-24, 3-24, 4-24, 5-24, 6-24, 6-18, 7-18, 8-18, 7-17, 8-17, 6-16, 7-17, or 8-16 atoms.

[0569] A cleavable linking group is one which is sufficiently stable outside the cell, but which upon entry into a target cell is cleaved to release the two parts the linker is holding together. In a preferred embodiment, the cleavable linking group is cleaved at least about 10 times, 20, times, 30 times, 40 times, 50 times, 60 times, 70 times, 80 times, 90 times, or more, or at least 100 times faster in a target cell or under a first reference condition (which can, e.g., be selected to mimic or represent intracellular conditions) than in the blood of a subject, or under a second reference condition (which can, e.g., be selected to mimic or represent conditions found in the blood or serum).

[0570] Cleavable linking groups are susceptible to cleavage agents, e.g., pH, redox potential, or the presence of degradative molecules. Generally, cleavage agents are more prevalent or found at higher levels or activities inside cells than in serum or blood. Examples of such degradative agents include: redox agents which are selected for particular substrates or which have no substrate specificity, including, e.g., oxidative or reductive enzymes or reductive agents such as mercaptans, present in cells, that can degrade a redox cleavable linking group by reduction; esterases; endosomes or agents that can create an acidic environment, e.g., those that result in a pH of five or lower; enzymes that can hydrolyze or degrade an acid cleavable linking group by acting as a general acid, peptidases (which can be substrate specific), and phosphatases.

[0571] A cleavable linkage group, such as a disulfide bond can be susceptible to pH. The pH of human serum is 7.4, while the average intracellular pH is slightly lower, ranging from about 7.1-7.3. Endosomes have a more acidic pH, in the range of 5.5-6.0, and lysosomes have an even more acidic pH at around 5.0. Some linkers will have a cleavable linking group that is cleaved at a preferred pH, thereby releasing a cationic lipid from the ligand inside the cell, or into the desired compartment of the cell.

[0572] A linker can include a cleavable linking group that is cleavable by a particular enzyme. The type of cleavable linking group incorporated into a linker can depend on the cell to be targeted. For example, a liver-targeting ligand can be linked to a cationic lipid through a linker that includes an ester group. Liver cells are rich in esterases, and therefore the linker will be cleaved more efficiently in liver cells than in cell types that are not esterase-rich. Other cell-types rich in esterases include cells of the lung, renal cortex, and testis.

[0573] Linkers that contain peptide bonds can be used when targeting cell types rich in peptidases, such as liver cells and synoviocytes.

[0574] In general, the suitability of a candidate cleavable linking group can be evaluated by testing the ability of a degradative agent (or condition) to cleave the candidate linking group. It will also be desirable to also test the candidate cleavable linking group for the ability to resist cleavage in the blood or when in contact with other non-target tissue. Thus, one can determine the relative susceptibility to cleavage between a first and a second condition, where the first is selected to be indicative of cleavage in a target cell and the second is selected to be indicative of cleavage in other tissues or biological fluids, e.g., blood or serum. The evaluations can be carried out in cell free systems, in cells, in cell culture, in organ or tissue culture, or in whole animals. It can be useful to make initial evaluations in cell-free or culture conditions and to confirm by further evaluations in whole animals. In preferred embodiments, useful candidate compounds are cleaved at least about 2, 4, 10, 20, 30, 40, 50, 60, 70, 80, 90, or 100 times faster in the cell (or under in vitro conditions selected to mimic intracellular conditions) as compared to blood or serum (or under in vitro conditions selected to mimic extracellular conditions).

[0575] i. Redox Cleavable Linking Groups

[0576] In certain embodiments, a cleavable linking group is a redox cleavable linking group that is cleaved upon reduction or oxidation. An example of reductively cleavable linking group is a disulphide linking group (—S—S—). To determine if a candidate cleavable linking group is a suitable “reductively cleavable linking group,” or for example is suitable for use with a particular iRNA moiety and particular targeting agent one can look to methods described herein. For example, a candidate can be evaluated by incubation with dithiothreitol (DTT), or other reducing agent using reagents know in the art, which mimic the rate of cleavage which would be observed in a cell, e.g., a target cell. The candidates can also be evaluated under conditions which are selected to mimic blood or serum conditions. In one, candidate compounds are cleaved by at most about 10% in the blood. In other embodiments, useful candidate compounds are degraded at least about 2, 4, 10, 20, 30, 40, 50, 60, 70, 80, 90, or about 100 times faster in the cell (or under in vitro conditions selected to mimic intracellular conditions) as compared to blood (or under in vitro conditions selected to mimic extracellular conditions). The rate of cleavage of candidate compounds can be determined using standard enzyme kinetics assays under conditions chosen to mimic intracellular media and compared to conditions chosen to mimic extracellular media.

[0577] ii. Phosphate-Based Cleavable Linking Groups

[0578] In other embodiments, a cleavable linker comprises a phosphate-based cleavable linking group. A phosphate-based cleavable linking group is cleaved by agents that degrade or hydrolyze the phosphate group. An example of an agent that cleaves phosphate groups in cells are enzymes such as phosphatases in cells. Examples of phosphate-based linking groups are —O—P(O)(ORk)-O—, —O—P(S)(ORk)-O—, —O—P(S)(SRk)-O—, —S—P(O)(ORk)-O—, —O—P(O)(ORk)-S—, —S—P(O)(ORk)-S—, —O—P(S)(ORk)-S—, —S—P(S)(ORk)-O—, —O—P(O)(Rk)-O—, —O—P(S)(Rk)-O—, —S—P(O)(Rk)-O—, —S—P(S)(Rk)-O—, —S—P(O)(Rk)-S—, —O—P(S)(Rk)-S—. Preferred embodiments are —O—P(O)(OH)—O—, —O—P(S)(OH)—O—, —O—P(S)(SH)—O—, —S—P(O)(OH)—O—, —O—P(O)(OH)—S—, —S—P(O)(OH)—S—, —O—P(S)(OH)—S—, —S—P(S)(OH)—O—, —O—P(O)(H)—O—, —O—P(S)(H)—O—, —S—P(O)(H)—O, —S—P(S)(H)—O—, —S—P(O)(H)—S—, and —O—P(S)(H)—S—. A preferred embodiment is —O—P(O)(OH)—O—. These candidates can be evaluated using methods analogous to those described above.

[0579] iii. Acid Cleavable Linking Groups

[0580] In other embodiments, a cleavable linker comprises an acid cleavable linking group. An acid cleavable linking group is a linking group that is cleaved under acidic conditions. In preferred embodiments acid cleavable linking groups are cleaved in an acidic environment with a pH of about 6.5 or lower (e.g., about 6.0, 5.5, 5.0, or lower), or by agents such as enzymes that can act as a general acid. In a cell, specific low pH organelles, such as endosomes and lysosomes can provide a cleaving environment for acid cleavable linking groups. Examples of acid cleavable linking groups include but are not limited to hydrazones, esters, and esters of amino acids. Acid cleavable groups can have the general formula —C═NN—, C(O)O, or —OC(O). A preferred embodiment is when the carbon attached to the oxygen of the ester (the alkoxy group) is an aryl group, substituted alkyl group, or tertiary alkyl group such as dimethyl pentyl or t-butyl. These candidates can be evaluated using methods analogous to those described above.

[0581] iv. Ester-Based Linking Groups

[0582] In other embodiments, a cleavable linker comprises an ester-based cleavable linking group. An ester-based cleavable linking group is cleaved by enzymes such as esterases and amidases in cells. Examples of ester-based cleavable linking groups include, but are not limited to, esters of alkylene, alkenylene and alkynylene groups. Ester cleavable linking groups have the general formula —C(O)O—, or —OC(O)—. These candidates can be evaluated using methods analogous to those described above.

[0583] v. Peptide-Based Cleaving Groups

[0584] In yet other embodiments, a cleavable linker comprises a peptide-based cleavable linking group. A peptide-based cleavable linking group is cleaved by enzymes such as peptidases and proteases in cells. Peptide-based cleavable linking groups are peptide bonds formed between amino acids to yield oligopeptides (e.g., dipeptides, tripeptides etc.) and polypeptides. Peptide-based cleavable groups do not include the amide group (—C(O)NH—). The amide group can be formed between any alkylene, alkenylene or alkynelene. A peptide bond is a special type of amide bond formed between amino acids to yield peptides and proteins. The peptide based cleavage group is generally limited to the peptide bond (i.e., the amide bond) formed between amino acids yielding peptides and proteins and does not include the entire amide functional group. Peptide-based cleavable linking groups have the general formula —NHCHRAC(O)NHCHRBC(O)—, where RA and RB are the R groups of the two adjacent amino acids. These candidates can be evaluated using methods analogous to those described above.

[0585] In some embodiments, an iRNA of the invention is conjugated to a carbohydrate through a linker. Non-limiting examples of iRNA carbohydrate conjugates with linkers of the compositions and methods of the invention include, but are not limited to,

[chemical structure]

[chemical structure]

[chemical structure]

when one of X or Y is an oligonucleotide, the other is a hydrogen.

[0586] In certain embodiments of the compositions and methods of the invention, a ligand is one or more “GalNAc” (N-acetylgalactosamine) derivatives attached through a bivalent or trivalent branched linker.

[0587] In one embodiment, a dsRNA of the invention is conjugated to a bivalent or trivalent branched linker selected from the group of structures shown in any of formula (XLV)-(XLVI):

[chemical structure]

[0588] wherein:
[0589] q2A, q2B, q3A, q3B, q4A, q4B, q5A, q5B and q5C represent independently for each occurrence 0-20 and wherein the repeating unit can be the same or different;
[0590] P^{2A}, P^{2B}, P^{3A}, P^{3B}, P^{4A}, P^{4B}, P^{5A}, P^{5B}, P^{5C}, T^{2A}, T^{2B}, T^{3A}, T^{3B}, T^{4A}, T^{4B}, T^{4A}, T^{5B}, T^{5C} are each independently for each occurrence absent, CO, NH, O, S, OC(O), NHC(O), CH₂, CH₂NH or CH₂O;
[0591] Q^{2A}, Q^{2B}, Q^{3A}, Q^{3B}, Q^{4A}, Q^{4B}, Q^{5A}, Q^{5B}, Q^{5C} are independently for each occurrence absent, alkylene, substituted alkylene wherein one or more methylenes can be interrupted or terminated by one or more of O, S, S(O), SO₂, N(R^{N}), C(R′)═C(R″), C≡C or C(O);
[0592] R^{2A}, R^{2B}, R^{3A}, R^{3A}, R^{4A}, R^{4B}, R^{5A}, R^{5B}, R^{5C} are each independently for each occurrence absent, NH, O, S, CH₂, C(O)O, C(O)NH, NHCH(R^{a})C(O), —C(O)—CH(R^{a})NH—, CO, CH═N-O,

[chemical structure]

or heterocyclyl; L^{2A}, L^{2B}, L^{3A}, L^{3B}, L^{4A}, L^{4B} L⁵A, L^{5B} and L^{5C} represent the ligand; i.e. each independently for each occurrence a monosaccharide (such as GalNAc), disaccharide, trisaccharide, tetrasaccharide, oligosaccharide, or polysaccharide; and R^{a} is H or amino acid side chain. Trivalent conjugating GalNAc derivatives are particularly useful for use with RNAi agents for inhibiting the expression of a target gene, such as those of formula (XLIX):

[chemical structure]

wherein L^{5A}, L^{5B} and L^{5C} represent a monosaccharide, such as GalNAc derivative.

[0593] Examples of suitable bivalent and trivalent branched linker groups conjugating GalNAc derivatives include, but are not limited to, the structures recited above as formulas II, VII, XI, X, and XIII.

[0594] Representative U.S. Patents that teach the preparation of RNA conjugates include, but are not limited to, U.S. Pat. Nos. 4,828,979; 4,948,882; 5,218,105; 5,525,465; 5,541,313; 5,545,730; 5,552,538; 5,578,717, 5,580,731; 5,591,584; 5,109,124; 5,118,802; 5,138,045; 5,414,077; 5,486,603; 5,512,439; 5,578,718; 5,608,046; 4,587,044; 4,605,735; 4,667,025; 4,762,779; 4,789,737; 4,824,941; 4,835,263; 4,876,335; 4,904,582; 4,958,013; 5,082,830; 5,112,963; 5,214,136; 5,082,830; 5,112,963; 5,214,136; 5,245,022; 5,254,469; 5,258,506; 5,262,536; 5,272,250; 5,292,873; 5,317,098; 5,371,241, 5,391,723; 5,416,203, 5,451,463; 5,510,475; 5,512,667; 5,514,785; 5,565,552; 5,567,810; 5,574,142; 5,585,481; 5,587,371; 5,595,726; 5,597,696; 5,599,923; 5,599,928;5,688,941; 6,294,664; 6,320,017; 6,576,752; 6,783,931; 6,900,297; 7,037,646; and 8,106,022, the entire contents of each of which are hereby incorporated herein by reference.

[0595] It is not necessary for all positions in a given compound to be uniformly modified, and in fact more than one of the aforementioned modifications can be incorporated in a single compound or even at a single nucleoside within an iRNA. The present invention also includes iRNA compounds that are chimeric compounds.

[0596] “Chimeric” iRNA compounds or “chimeras,” in the context of this invention, are iRNA compounds, preferably dsRNAi agents, that contain two or more chemically distinct regions, each made up of at least one monomer unit, i.e., a nucleotide in the case of a dsRNA compound. These iRNAs typically contain at least one region wherein the RNA is modified so as to confer upon the iRNA increased resistance to nuclease degradation, increased cellular uptake, or increased binding affinity for the target nucleic acid. An additional region of the iRNA can serve as a substrate for enzymes capable of cleaving RNA:DNA or RNA:RNA hybrids. By way of example, RNase H is a cellular endonuclease which cleaves the RNA strand of an RNA:DNA duplex. Activation of RNase H, therefore, results in cleavage of the RNA target, thereby greatly enhancing the efficiency of iRNA inhibition of gene expression. Consequently, comparable results can often be obtained with shorter iRNAs when chimeric dsRNAs are used, compared to phosphorothioate deoxy dsRNAs hybridizing to the same target region. Cleavage of the RNA target can be routinely detected by gel electrophoresis and, if necessary, associated nucleic acid hybridization techniques known in the art.

[0597] In certain instances, the RNA of an iRNA can be modified by a non-ligand group. A number of non-ligand molecules have been conjugated to iRNAs in order to enhance the activity, cellular distribution or cellular uptake of the iRNA, and procedures for performing such conjugations are available in the scientific literature. Such non-ligand moieties have included lipid moieties, such as cholesterol (Kubo, T. et al., Biochem. Biophys. Res. Comm., 2007, 365(1):54-61; Letsinger et al., Proc. Natl. Acad. Sci. USA, 1989, 86:6553), cholic acid (Manoharan et al., Bioorg. Med. Chem. Lett., 1994, 4:1053), a thioether, e.g., hexyl-S-tritylthiol (Manoharan et al., Ann. N.Y. Acad. Sci., 1992, 660:306; Manoharan et al., Bioorg. Med. Chem. Let., 1993, 3:2765), a thiocholesterol (Oberhauser et al., Nucl. Acids Res., 1992, 20:533), an aliphatic chain, e.g., dodecandiol or undecyl residues (Saison-Behmoaras et al., EMBO J., 1991, 10:111; Kabanov et al., FEBS Lett., 1990, 259:327; Svinarchuk et al., Biochimie, 1993, 75:49), a phospholipid, e.g., di-hexadecyl-rac-glycerol or triethylammonium 1,2-di-O-hexadecyl-rac-glycero-3-H-phosphonate (Manoharan et al., Tetrahedron Lett., 1995, 36:3651; Shea et al., Nucl. Acids Res., 1990, 18:3777), a polyamine or a polyethylene glycol chain (Manoharan et al., Nucleosides & Nucleotides, 1995, 14:969), or adamantane acetic acid (Manoharan et al., Tetrahedron Lett., 1995, 36:3651), a palmityl moiety (Mishra et al., Biochim. Biophys. Acta, 1995, 1264:229), or an octadecylamine or hexylamino-carbonyl-oxycholesterol moiety (Crooke et al., J. Pharmacol. Exp. Ther., 1996, 277:923). Representative United States patents that teach the preparation of such RNA conjugates have been listed above. Typical conjugation protocols involve the synthesis of RNAs bearing an aminolinker at one or more positions of the sequence. The amino group is then reacted with the molecule being conjugated using appropriate coupling or activating reagents. The conjugation reaction can be performed either with the RNA still bound to the solid support or following cleavage of the RNA, in solution phase. Purification of the RNA conjugate by HPLC typically affords the pure conjugate.

### V. Delivery of an iRNA of the Invention

[0598] The delivery of an iRNA of the invention to a cell e.g., a cell within a subject, such as a human subject (e.g., a subject in need thereof, such as a subject having a C9-associated disease as described herein) can be achieved in a number of different ways. For example, delivery may be performed by contacting a cell with an iRNA of the invention either in vitro or in vivo. In vivo delivery may also be performed directly by administering a composition comprising an iRNA, e.g., a dsRNA, to a subject. Alternatively, in vivo delivery may be performed indirectly by administering one or more vectors that encode and direct the expression of the iRNA. These alternatives are discussed further below.

[0599] In general, any method of delivering a nucleic acid molecule (in vitro or in vivo) can be adapted for use with an iRNA of the invention (see e.g., Akhtar S. and Julian R L. (1992) Trends Cell. Biol. 2(5):139-144 and WO94/02595, which are incorporated herein by reference in their entireties). For in vivo delivery, factors to consider in order to deliver an iRNA molecule include, for example, biological stability of the delivered molecule, prevention of non-specific effects, and accumulation of the delivered molecule in the target tissue. RNA interference has also shown success with local delivery to the CNS by direct injection (Dorn, G., et al. (2004) Nucleic Acids 32:e49; Tan, P H., et al (2005) Gene Ther. 12:59-66; Makimura, H., et al (2002) BMC Neurosci. 3:18; Shishkina, G T., et al (2004) Neuroscience 129:521-528; Thakker, E R., et al (2004) Proc. Natl. Acad. Sci. U.S.A. 101:17270-17275; Akaneya, Y., et al (2005) J. Neurophysiol. 93:594-602). Modification of the RNA or the pharmaceutical carrier can also permit targeting of the iRNA to the target tissue and avoid undesirable off-target effects. iRNA molecules can be modified by chemical conjugation to lipophilic groups such as cholesterol to enhance cellular uptake and prevent degradation. For example, an iRNA directed against ApoB conjugated to a lipophilic cholesterol moiety was injected systemically into mice and resulted in knockdown of apoB mRNA in both the liver and jejunum (Soutschek, J., et al (2004) Nature 432:173-178).

[0600] In an alternative embodiment, the iRNA can be delivered using drug delivery systems such as a nanoparticle, a dendrimer, a polymer, liposomes, or a cationic delivery system. Positively charged cationic delivery systems facilitate binding of an iRNA molecule (negatively charged) and also enhance interactions at the negatively charged cell membrane to permit efficient uptake of an iRNA by the cell. Cationic lipids, dendrimers, or polymers can either be bound to an iRNA, or induced to form a vesicle or micelle (see e.g., Kim S H, et al (2008) Journal of Controlled Release 129(2):107-116) that encases an iRNA. The formation of vesicles or micelles further prevents degradation of the iRNA when administered systemically. Methods for making and administering cationic-iRNA complexes are well within the abilities of one skilled in the art (see e.g., Sorensen, D R, et al (2003) J. Mol. Biol 327:761-766; Verma, U N, et al (2003) Clin. Cancer Res. 9:1291-1300; Arnold, A S et al (2007) J. Hypertens. 25:197-205, which are incorporated herein by reference in their entirety). Some non-limiting examples of drug delivery systems useful for systemic delivery of iRNAs include DOTAP (Sorensen, D R., et al (2003), supra; Verma, U N, et al (2003), supra), “solid nucleic acid lipid particles” (Zimmermann, T S, et al (2006) Nature 441:111-114), cardiolipin (Chien, P Y, et al (2005) Cancer Gene Ther. 12:321-328; Pal, A, et al (2005) Int J. Oncol. 26:1087-1091), polyethyleneimine (Bonnet M E, et al (2008) Pharm. Res. August 16 Epub ahead of print; Aigner, A. (2006) J. Biomed. Biotechnol. 71659), Arg-Gly-Asp (RGD) peptides (Liu, S. (2006) Mol. Pharm. 3:472-487), and polyamidoamines (Tomalia, D A, et al (2007) Biochem. Soc. Trans. 35:61-67; Yoo, H., et al (1999) Pharm. Res. 16:1799-1804). In some embodiments, an iRNA forms a complex with cyclodextrin for systemic administration. Methods for administration and pharmaceutical compositions of iRNAs and cyclodextrins can be found in U.S. Pat. No. 7,427,605, which is herein incorporated by reference in its entirety.

[0601] A. Vector Encoded iRNAs of the Invention

[0602] iRNA targeting the C9 gene can be expressed from transcription units inserted into DNA or RNA vectors (see, e.g., Couture, A, et al., TIG. (1996), 12:5-10; Skillern, A, et al., International PCT Publication No. WO 00/22113, Conrad, International PCT Publication No. WO 00/22114, and Conrad, U.S. Pat. No. 6,054,299). Expression can be transient (on the order of hours to weeks) or sustained (weeks to months or longer), depending upon the specific construct used and the target tissue or cell type. These transgenes can be introduced as a linear construct, a circular plasmid, or a viral vector, which can be an integrating or non-integrating vector. The transgene can also be constructed to permit it to be inherited as an extrachromosomal plasmid (Gassmann, et al., Proc. Natl. Acad. Sci. USA (1995) 92:1292).

[0603] Viral vector systems which can be utilized with the methods and compositions described herein include, but are not limited to, (a) adenovirus vectors; (b) retrovirus vectors, including but not limited to lentiviral vectors, moloney murine leukemia virus, etc.; (c) adeno-associated virus vectors; (d) herpes simplex virus vectors; (e) SV 40 vectors; (f) polyoma virus vectors; (g) papilloma virus vectors; (h) picornavirus vectors; (i) pox virus vectors such as an orthopox, e.g., vaccinia virus vectors or avipox, e.g. canary pox or fowl pox; and (j) a helper-dependent or gutless adenovirus. Replication-defective viruses can also be advantageous. Different vectors will or will not become incorporated into the cells' genome. The constructs can include viral sequences for transfection, if desired. Alternatively, the construct can be incorporated into vectors capable of episomal replication, e.g. EPV and EBV vectors. Constructs for the recombinant expression of an iRNA will generally require regulatory elements, e.g., promoters, enhancers, etc., to ensure the expression of the iRNA in target cells. Other aspects to consider for vectors and constructs are known in the art.

### VI. Pharmaceutical Compositions of the Invention

[0604] The present invention also includes pharmaceutical compositions and formulations which include the iRNAs of the invention. In one embodiment, provided herein are pharmaceutical compositions containing an iRNA, as described herein, and a pharmaceutically acceptable carrier. The pharmaceutical compositions containing the iRNA are useful for preventing or treating a C9-associated disorder, e.g., paroxysmal nocturnal hemoglobinuria (PNH), atypical hemolytic uremic syndrome (aHUS) or myasthenia gravis (MG). Such pharmaceutical compositions are formulated based on the mode of delivery. One example is compositions that are formulated for systemic administration via parenteral delivery, e.g., by subcutaneous (SC), intramuscular (IM), or intravenous (IV) delivery. The pharmaceutical compositions of the invention may be administered in dosages sufficient to inhibit expression of a C9 gene.

[0605] In some embodiments, the pharmaceutical compositions of the invention are sterile. In another embodiment, the pharmaceutical compositions of the invention are pyrogen free.

[0606] The pharmaceutical compositions of the invention may be administered in dosages sufficient to inhibit expression of a C9 gene. In general, a suitable dose of an iRNA of the invention will be in the range of about 0.001 to about 200.0 milligrams per kilogram body weight of the recipient per day, generally in the range of about 1 to 50 mg per kilogram body weight per day. Typically, a suitable dose of an iRNA of the invention will be in the range of about 0.1 mg/kg to about 5.0 mg/kg, preferably about 0.3 mg/kg and about 3.0 mg/kg. A repeat-dose regimen may include administration of a therapeutic amount of iRNA on a regular basis, such as every month, once every 3-6 months, or once a year. In certain embodiments, the iRNA is administered about once per month to about once per six months.

[0607] After an initial treatment regimen, the treatments can be administered on a less frequent basis. Duration of treatment can be determined based on the severity of disease.

[0608] In other embodiments, a single dose of the pharmaceutical compositions can be long lasting, such that doses are administered at not more than 1, 2, 3, or 4 month intervals. In some embodiments of the invention, a single dose of the pharmaceutical compositions of the invention is administered about once per month. In other embodiments of the invention, a single dose of the pharmaceutical compositions of the invention is administered quarterly (i.e., about every three months). In other embodiments of the invention, a single dose of the pharmaceutical compositions of the invention is administered twice per year (i.e., about once every six months).

[0609] The skilled artisan will appreciate that certain factors can influence the dosage and timing required to effectively treat a subject, including but not limited to mutations present in the subject, previous treatments, the general health or age of the subject, and other diseases present. Moreover, treatment of a subject with a prophylactically or therapeutically effective amount, as appropriate, of a composition can include a single treatment or a series of treatments.

[0610] The iRNA can be delivered in a manner to target a particular tissue (e.g., hepatocytes).

[0611] Pharmaceutical compositions of the present invention include, but are not limited to, solutions, emulsions, and liposome-containing formulations. These compositions can be generated from a variety of components that include, but are not limited to, preformed liquids, self-emulsifying solids, and self-emulsifying semisolids. Formulations include those that target the liver.

[0612] The pharmaceutical formulations of the present invention, which can conveniently be presented in unit dosage form, can be prepared according to conventional techniques well known in the pharmaceutical industry. Such techniques include the step of bringing into association the active ingredients with the pharmaceutical carrier(s) or excipient(s). In general, the formulations are prepared by uniformly and intimately bringing into association the active ingredients with liquid carriers.

[0613] A. Additional Formulations

[0614] i. Emulsions

[0615] The compositions of the present invention can be prepared and formulated as emulsions. Emulsions are typically heterogeneous systems of one liquid dispersed in another in the form of droplets usually exceeding 0.1 μm in diameter (see e.g., Ansel's Pharmaceutical Dosage Forms and Drug Delivery Systems, Allen, LV., Popovich N G., and Ansel H C., 2004, Lippincott Williams & Wilkins (8th ed.), New York, NY; Idson, in Pharmaceutical Dosage Forms, Lieberman, Rieger and Banker (Eds.), 1988, Marcel Dekker, Inc., New York, N.Y., volume 1, p. 199; Rosoff, in Pharmaceutical Dosage Forms, Lieberman, Rieger and Banker (Eds.), 1988, Marcel Dekker, Inc., New York, N.Y., Volume 1, p. 245; Block in Pharmaceutical Dosage Forms, Lieberman, Rieger and Banker (Eds.), 1988, Marcel Dekker, Inc., New York, N.Y., volume 2, p. 335; Higuchi et al., in Remington's Pharmaceutical Sciences, Mack Publishing Co., Easton, Pa., 1985, p. 301). Emulsions are often biphasic systems comprising two immiscible liquid phases intimately mixed and dispersed with each other. In general, emulsions can be of either the water-in-oil (w/o) or the oil-in-water (o/w) variety. When an aqueous phase is finely divided into and dispersed as minute droplets into a bulk oily phase, the resulting composition is called a water-in-oil (w/o) emulsion. Alternatively, when an oily phase is finely divided into and dispersed as minute droplets into a bulk aqueous phase, the resulting composition is called an oil-in-water (o/w) emulsion. Emulsions can contain additional components in addition to the dispersed phases, and the active drug which can be present as a solution either in the aqueous phase, oily phase or itself as a separate phase. Pharmaceutical excipients such as emulsifiers, stabilizers, dyes, and anti-oxidants can also be present in emulsions as needed. Pharmaceutical emulsions can also be multiple emulsions that are comprised of more than two phases such as, for example, in the case of oil-in-water-in-oil (o/w/o) and water-in-oil-in-water (w/o/w) emulsions. Such complex formulations often provide certain advantages that simple binary emulsions do not. Multiple emulsions in which individual oil droplets of an o/w emulsion enclose small water droplets constitute a w/o/w emulsion. Likewise a system of oil droplets enclosed in globules of water stabilized in an oily continuous phase provides an o/w/o emulsion.

[0616] Emulsions are characterized by little or no thermodynamic stability. Often, the dispersed or discontinuous phase of the emulsion is well dispersed into the external or continuous phase and maintained in this form through the means of emulsifiers or the viscosity of the formulation. Other means of stabilizing emulsions entail the use of emulsifiers that can be incorporated into either phase of the emulsion. Emulsifiers can broadly be classified into four categories: synthetic surfactants, naturally occurring emulsifiers, absorption bases, and finely dispersed solids (see e.g., Ansel's Pharmaceutical Dosage Forms and Drug Delivery Systems, Allen, LV., Popovich N G., and Ansel H C., 2004, Lippincott Williams & Wilkins (8th ed.), New York, NY; Idson, in Pharmaceutical Dosage Forms, Lieberman, Rieger and Banker (Eds.), 1988, Marcel Dekker, Inc., New York, N.Y., volume 1, p. 199).

[0617] Synthetic surfactants, also known as surface active agents, have found wide applicability in the formulation of emulsions and have been reviewed in the literature (see e.g., Ansel's Pharmaceutical Dosage Forms and Drug Delivery Systems, Allen, LV., Popovich N G., and Ansel H C., 2004, Lippincott Williams & Wilkins (8th ed.), New York, NY; Rieger, in Pharmaceutical Dosage Forms, Lieberman, Rieger and Banker (Eds.), 1988, Marcel Dekker, Inc., New York, N.Y., volume 1, p. 285; Idson, in Pharmaceutical Dosage Forms, Lieberman, Rieger and Banker (Eds.), Marcel Dekker, Inc., New York, N.Y., 1988, volume 1, p. 199). Surfactants are typically amphiphilic and comprise a hydrophilic and a hydrophobic portion. The ratio of the hydrophilic to the hydrophobic nature of the surfactant has been termed the hydrophile/lipophile balance (HLB) and is a valuable tool in categorizing and selecting surfactants in the preparation of formulations. Surfactants can be classified into different classes based on the nature of the hydrophilic group: nonionic, anionic, cationic, and amphoteric (see e.g., Ansel's Pharmaceutical Dosage Forms and Drug Delivery Systems, Allen, LV., Popovich N G., and Ansel H C., 2004, Lippincott Williams & Wilkins (8th ed.), New York, NY Rieger, in Pharmaceutical Dosage Forms, Lieberman, Rieger and Banker (Eds.), 1988, Marcel Dekker, Inc., New York, N.Y., volume 1, p. 285).

[0618] A large variety of non-emulsifying materials are also included in emulsion formulations and contribute to the properties of emulsions. These include fats, oils, waxes, fatty acids, fatty alcohols, fatty esters, humectants, hydrophilic colloids, preservatives, and antioxidants (Block, in Pharmaceutical Dosage Forms, Lieberman, Rieger and Banker (Eds.), 1988, Marcel Dekker, Inc., New York, N.Y., volume 1, p. 335; Idson, in Pharmaceutical Dosage Forms, Lieberman, Rieger and Banker (Eds.), 1988, Marcel Dekker, Inc., New York, N.Y., volume 1, p. 199).

[0619] The application of emulsion formulations via dermatological, oral, and parenteral routes, and methods for their manufacture have been reviewed in the literature (see e.g., Ansel's Pharmaceutical Dosage Forms and Drug Delivery Systems, Allen, LV., Popovich N G., and Ansel H C., 2004, Lippincott Williams & Wilkins (8th ed.), New York, NY; Idson, in Pharmaceutical Dosage Forms, Lieberman, Rieger and Banker (Eds.), 1988, Marcel Dekker, Inc., New York, N.Y., volume 1, p. 199).

[0620] ii. Microemulsions

[0621] In one embodiment of the present invention, the compositions of iRNAs and nucleic acids are formulated as microemulsions. A microemulsion can be defined as a system of water, oil, and amphiphile which is a single optically isotropic and thermodynamically stable liquid solution (see e.g., Ansel's Pharmaceutical Dosage Forms and Drug Delivery Systems, Allen, LV., Popovich N G., and Ansel H C., 2004, Lippincott Williams & Wilkins (8th ed.), New York, NY; Rosoff, in Pharmaceutical Dosage Forms, Lieberman, Rieger and Banker (Eds.), 1988, Marcel Dekker, Inc., New York, N.Y., volume 1, p. 245). Typically microemulsions are systems that are prepared by first dispersing an oil in an aqueous surfactant solution and then adding a sufficient amount of a fourth component, generally an intermediate chain-length alcohol to form a transparent system. Therefore, microemulsions have also been described as thermodynamically stable, isotropically clear dispersions of two immiscible liquids that are stabilized by interfacial films of surface-active molecules (Leung and Shah, in: Controlled Release of Drugs: Polymers and Aggregate Systems, Rosoff, M., Ed., 1989, VCH Publishers, New York, pages 185-215).

[0622] iii. Microparticles

[0623] An iRNA of the invention may be incorporated into a particle, e.g., a microparticle. Microparticles can be produced by spray-drying, but may also be produced by other methods including lyophilization, evaporation, fluid bed drying, vacuum drying, or a combination of these techniques.

[0624] iv. Penetration Enhancers

[0625] In one embodiment, the present invention employs various penetration enhancers to effect the efficient delivery of nucleic acids, particularly iRNAs, to the skin of animals. Most drugs are present in solution in both ionized and nonionized forms. However, usually only lipid soluble or lipophilic drugs readily cross cell membranes. It has been discovered that even non-lipophilic drugs can cross cell membranes if the membrane to be crossed is treated with a penetration enhancer. In addition to aiding the diffusion of non-lipophilic drugs across cell membranes, penetration enhancers also enhance the permeability of lipophilic drugs.

[0626] Penetration enhancers can be classified as belonging to one of five broad categories, i.e., surfactants, fatty acids, bile salts, chelating agents, and non-chelating non-surfactants (see e.g., Malmsten, M. Surfactants and polymers in drug delivery, Informa Health Care, New York, NY, 2002; Lee et al., Critical Reviews in Therapeutic Drug Carrier Systems, 1991, p. 92). Each of the above mentioned classes of penetration enhancers and their use in manufacture of pharmaceutical compositions and delivery of pharmaceutical agents are well known in the art.

[0627] v. Excipients

[0628] In contrast to a carrier compound, a “pharmaceutical carrier” or “excipient” is a pharmaceutically acceptable solvent, suspending agent, or any other pharmacologically inert vehicle for delivering one or more nucleic acids to an animal. The excipient can be liquid or solid and is selected, with the planned manner of administration in mind, so as to provide for the desired bulk, consistency, etc., when combined with a nucleic acid and the other components of a given pharmaceutical composition. Such agent are well known in the art.

[0629] vi. Other Components

[0630] The compositions of the present invention can additionally contain other adjunct components conventionally found in pharmaceutical compositions, at their art-established usage levels. Thus, for example, the compositions can contain additional, compatible, pharmaceutically-active materials such as, for example, antipruritics, astringents, local anesthetics or anti-inflammatory agents, or can contain additional materials useful in physically formulating various dosage forms of the compositions of the present invention, such as dyes, flavoring agents, preservatives, antioxidants, opacifiers, thickening agents and stabilizers. However, such materials, when added, should not unduly interfere with the biological activities of the components of the compositions of the present invention. The formulations can be sterilized and, if desired, mixed with auxiliary agents, e.g., lubricants, preservatives, stabilizers, wetting agents, emulsifiers, salts for influencing osmotic pressure, buffers, colorings, flavorings, or aromatic substances, and the like which do not deleteriously interact with the nucleic acid(s) of the formulation.

[0631] Aqueous suspensions can contain substances which increase the viscosity of the suspension including, for example, sodium carboxymethylcellulose, sorbitol, or dextran. The suspension can also contain stabilizers.

[0632] In some embodiments, pharmaceutical compositions featured in the invention include (a) one or more iRNA and (b) one or more agents which function by a non-iRNA mechanism and which are useful in treating a C9-associated disorder, e.g., paroxysmal nocturnal hemoglobinuria (PNH), atypical hemolytic uremic syndrome (aHUS) or myasthenia gravis (MG).

[0633] Toxicity and prophylactic efficacy of such compounds can be determined by standard pharmaceutical procedures in cell cultures or experimental animals, e.g., for determining the LD50 (the dose lethal to 50% of the population) and the ED50 (the dose prophylactically effective in 50% of the population). The dose ratio between toxic and therapeutic effects is the therapeutic index and it can be expressed as the ratio LD50/ED50. Compounds that exhibit high therapeutic indices are preferred.

[0634] The data obtained from cell culture assays and animal studies can be used in formulating a range of dosage for use in humans. The dosage of compositions featured herein in the invention lies generally within a range of circulating concentrations that include the ED50, preferably an ED80 or ED90, with little or no toxicity. The dosage can vary within this range depending upon the dosage form employed and the route of administration utilized. For any compound used in the methods featured in the invention, the prophylactically effective dose can be estimated initially from cell culture assays. A dose can be formulated in animal models to achieve a circulating plasma concentration range of the compound or, when appropriate, of the polypeptide product of a target sequence (e.g., achieving a decreased concentration of the polypeptide) that includes the IC50 (i.e., the concentration of the test compound which achieves a half-maximal inhibition of symptoms) or higher levels of inhibition as determined in cell culture. Such information can be used to more accurately determine useful doses in humans. Levels in plasma can be measured, for example, by high performance liquid chromatography.

[0635] In addition to their administration, as discussed above, the iRNAs featured in the invention can be administered in combination with other known agents used for the prevention or treatment of a C9-associated disorder, e.g., paroxysmal nocturnal hemoglobinuria (PNH), atypical hemolytic uremic syndrome (aHUS) or myasthenia gravis (MG). In any event, the administering physician can adjust the amount and timing of iRNA administration on the basis of results observed using standard measures of efficacy known in the art or described herein.

### VII. Methods for Inhibiting Complement Component 9 Expression

[0636] The present invention also provides methods of inhibiting expression of a C9 gene in a cell. The methods include contacting a cell with an RNAi agent, e.g., double stranded RNA agent, in an amount effective to inhibit expression of C9 in the cell, thereby inhibiting expression of C9 in the cell.

[0637] Contacting of a cell with an iRNA, e.g., a double stranded RNA agent, may be done in vitro or in vivo. Contacting a cell in vivo with the iRNA includes contacting a cell or group of cells within a subject, e.g., a human subject, with the iRNA. Combinations of in vitro and in vivo methods of contacting a cell are also possible. Contacting a cell may be direct or indirect, as discussed above. Furthermore, contacting a cell may be accomplished via a targeting ligand, including any ligand described herein or known in the art. In preferred embodiments, the targeting ligand is a carbohydrate moiety, e.g., a GalNAc₃ ligand, or any other ligand that directs the RNAi agent to a site of interest.

[0638] The term “inhibiting,” as used herein, is used interchangeably with “reducing,” “silencing,” “downregulating”, “suppressing”, and other similar terms, and includes any level of inhibition.

[0639] The phrase “inhibiting expression of a complement component C9” is intended to refer to inhibition of expression of any C9 gene (such as, e.g., a mouse C9 gene, a rat C9 gene, a monkey C9 gene, or a human C9 gene) as well as variants or mutants of a C9 gene. Thus, the C9 gene may be a wild-type C9 gene, a mutant C9 gene, or a transgenic C9 gene in the context of a genetically manipulated cell, group of cells, or organism.

[0640] “Inhibiting expression of a complement component C9 gene” includes any level of inhibition of a C9 gene, e.g., at least partial suppression of the expression of a C9 gene. The expression of the C9 gene may be assessed based on the level, or the change in the level, of any variable associated with C9 gene expression, e.g., C9 mRNA level or C9 protein level or, for example, CH50 activity as a measure of total hemolytic complement, AH50 to measure the hemolytic activity of the alternate pathway of complement, and/or lactate dehydrogenase (LDH) levels as a measure of intravascular hemolysis, and/or hemoglobin levels. Levels of CFB, C3, C5, C5a, C5b, and soluble C5b-9 complex may also be measured to assess C9 expression. This level may be assessed in an individual cell or in a group of cells, including, for example, a sample derived from a subject, e.g., a liver tissue or cell.

[0641] Inhibition may be assessed by a decrease in an absolute or relative level of one or more variables that are associated with C9 expression compared with a control level. The control level may be any type of control level that is utilized in the art, e.g., a pre-dose baseline level, or a level determined from a similar subject, cell, or sample that is untreated or treated with a control (such as, e.g., buffer only control or inactive agent control).

[0642] In some embodiments of the methods of the invention, expression of a C9 gene is inhibited by at least 50%, 55%, 60%, 65%, 70%, 75%, 80%, 85%, 90%, or 95%, or to below the level of detection of the assay. In preferred embodiments, expression of a C9 gene is inhibited by at least 70%. It is further understood that inhibition of C9 expression in certain tissues, e.g., in liver, without a significant inhibition of expression in other tissues, e.g., brain, may be desirable. In preferred embodiments, expression level is determined using the assay method provided in Example 2 with a 10 nM siRNA concentration in the appropriate species matched cell line.

[0643] In certain embodiments, inhibition of expression in vivo is determined by knockdown of the human gene in a rodent expressing the human gene, e.g., an AAV-infected mouse expressing the human target gene (i.e., C9), e.g., when administered as a single dose, e.g., at 3 mg/kg at the nadir of RNA expression. Knockdown of expression of an endogenous gene in a model animal system can also be determined, e.g., after administration of a single dose at, e.g., 3 mg/kg at the nadir of RNA expression. Such systems are useful when the nucleic acid sequence of the human gene and the model animal gene are sufficiently close such that the human iRNA provides effective knockdown of the model animal gene. RNA expression in liver is determined using the PCR methods provided in Example 2.

[0644] Inhibition of the expression of a C9 gene may be manifested by a reduction of the amount of mRNA expressed by a first cell or group of cells (such cells may be present, for example, in a sample derived from a subject) in which a C9 gene is transcribed and which has or have been treated (e.g., by contacting the cell or cells with an iRNA of the invention, or by administering an iRNA of the invention to a subject in which the cells are or were present) such that the expression of a C9 gene is inhibited, as compared to a second cell or group of cells substantially identical to the first cell or group of cells but which has not or have not been so treated (control cell(s) not treated with an iRNA or not treated with an iRNA targeted to the gene of interest). In preferred embodiments, the inhibition is assessed by the method provided in Example 2 using a 10 nM siRNA concentration in the species matched cell line and expressing the level of mRNA in treated cells as a percentage of the level of mRNA in control cells, using the following formula:

$$\frac{( mRNA in control cells ) - ( mRNA in treated cells )}{( mRNA in control cells )} \cdot 100 \%$$

[0645] In other embodiments, inhibition of the expression of a C9 gene may be assessed in terms of a reduction of a parameter that is functionally linked to C9 gene expression, e.g., C9 protein level in blood or serum from a subject. C9 gene silencing may be determined in any cell expressing C9, either endogenous or heterologous from an expression construct, and by any assay known in the art.

[0646] Inhibition of the expression of a C9 protein may be manifested by a reduction in the level of the C9 protein that is expressed by a cell or group of cells or in a subject sample (e.g., the level of protein in a blood sample derived from a subject). As explained above, for the assessment of mRNA suppression, the inhibition of protein expression levels in a treated cell or group of cells may similarly be expressed as a percentage of the level of protein in a control cell or group of cells, or the change in the level of protein in a subject sample, e.g., blood or serum derived therefrom.

[0647] A control cell, a group of cells, or subject sample that may be used to assess the inhibition of the expression of a C9 gene includes a cell, group of cells, or subject sample that has not yet been contacted with an RNAi agent of the invention. For example, the control cell, group of cells, or subject sample may be derived from an individual subject (e.g., a human or animal subject) prior to treatment of the subject with an RNAi agent or an appropriately matched population control.

[0648] The level of C9 mRNA that is expressed by a cell or group of cells may be determined using any method known in the art for assessing mRNA expression. In one embodiment, the level of expression of C9 in a sample is determined by detecting a transcribed polynucleotide, or portion thereof, e.g., mRNA of the C9 gene. RNA may be extracted from cells using RNA extraction techniques including, for example, using acid phenol/guanidine isothiocyanate extraction (RNAzol B; Biogenesis), RNeasy™ RNA preparation kits (Qiagen®) or PAXgene™ (PreAnalytix™, Switzerland). Typical assay formats utilizing ribonucleic acid hybridization include nuclear run-on assays, RT-PCR, RNase protection assays, northern blotting, in situ hybridization, and microarray analysis.

[0649] In some embodiments, the level of expression of C9 is determined using a nucleic acid probe. The term “probe”, as used herein, refers to any molecule that is capable of selectively binding to a specific C9. Probes can be synthesized by one of skill in the art, or derived from appropriate biological preparations. Probes may be specifically designed to be labeled. Examples of molecules that can be utilized as probes include, but are not limited to, RNA, DNA, proteins, antibodies, and organic molecules.

[0650] Isolated mRNA can be used in hybridization or amplification assays that include, but are not limited to, Southern or northern analyses, polymerase chain reaction (PCR) analyses and probe arrays. One method for the determination of mRNA levels involves contacting the isolated mRNA with a nucleic acid molecule (probe) that can hybridize to C9 mRNA. In one embodiment, the mRNA is immobilized on a solid surface and contacted with a probe, for example by running the isolated mRNA on an agarose gel and transferring the mRNA from the gel to a membrane, such as nitrocellulose. In an alternative embodiment, the probe(s) are immobilized on a solid surface and the mRNA is contacted with the probe(s), for example, in an Affymetrix® gene chip array. A skilled artisan can readily adapt known mRNA detection methods for use in determining the level of C9 mRNA.

[0651] An alternative method for determining the level of expression of C9 in a sample involves the process of nucleic acid amplification or reverse transcriptase (to prepare cDNA) of for example mRNA in the sample, e.g., by RT-PCR (the experimental embodiment set forth in Mullis, 1987, U.S. Pat. No. 4,683,202), ligase chain reaction (Barany (1991) Proc. Nat. Acad. Sci. USA 88:189-193), self sustained sequence replication (Guatelli et al. (1990) Proc. Nat. Acad. Sci. USA 87:1874-1878), transcriptional amplification system (Kwoh et al. (1989) Proc. Nat. Acad. Sci. USA 86:1173-1177), Q-Beta Replicase (Lizardi et al. (1988) Bio/Technology 6:1197), rolling circle replication (Lizardi et al., U.S. Pat. No. 5,854,033) or any other nucleic acid amplification method, followed by the detection of the amplified molecules using techniques well known to those of skill in the art. These detection schemes are especially useful for the detection of nucleic acid molecules if such molecules are present in very low numbers. In particular aspects of the invention, the level of expression of C9 is determined by quantitative fluorogenic RT-PCR (i.e., the TaqMan™ System). In preferred embodiments, expression level is determined by the method provided in Example 2 using, e.g., a 10 nM siRNA concentration, in the species matched cell line.

[0652] The expression levels of C9 mRNA may be monitored using a membrane blot (such as used in hybridization analysis such as northern, Southern, dot, and the like), or microwells, sample tubes, gels, beads or fibers (or any solid support comprising bound nucleic acids). See U.S. Pat. Nos. 5,770,722, 5,874,219, 5,744,305, 5,677,195 and 5,445,934, which are incorporated herein by reference. The determination of C9 expression level may also comprise using nucleic acid probes in solution.

[0653] In preferred embodiments, the level of mRNA expression is assessed using branched DNA (bDNA) assays or real time PCR (qPCR). The use of these methods is described and exemplified in the Examples presented herein. In preferred embodiments, expression level is determined by the method provided in Example 2 using a lOnM siRNA concentration in the species matched cell line.

[0654] The level of C9 protein expression may be determined using any method known in the art for the measurement of protein levels. Such methods include, for example, electrophoresis, capillary electrophoresis, high performance liquid chromatography (HPLC), thin layer chromatography (TLC), hyperdiffusion chromatography, fluid or gel precipitin reactions, absorption spectroscopy, a colorimetric assays, spectrophotometric assays, flow cytometry, immunodiffusion (single or double), immunoelectrophoresis, western blotting, radioimmunoassay (RIA), enzyme-linked immunosorbent assays (ELISAs), immunofluorescent assays, electrochemiluminescence assays, and the like.

[0655] In some embodiments, the efficacy of the methods of the invention are assessed by a decrease in C9 mRNA or protein level (e.g., in a liver biopsy).

[0656] In some embodiments of the methods of the invention, the iRNA is administered to a subject such that the iRNA is delivered to a specific site within the subject. The inhibition of expression of C9 may be assessed using measurements of the level or change in the level of C9 mRNA or C9 protein in a sample derived from fluid or tissue from the specific site within the subject (e.g., liver or blood).

[0657] As used herein, the terms detecting or determining a level of an analyte are understood to mean performing the steps to determine if a material, e.g., protein, RNA, is present. As used herein, methods of detecting or determining include detection or determination of an analyte level that is below the level of detection for the method used.

### VIII. Prophylactic and Treatment Methods of the Invention

[0658] The present invention also provides methods of using an iRNA of the invention or a composition containing an iRNA of the invention to inhibit expression of complement component 9 (C9), thereby preventing or treating a C9-associated disorder, e.g., paroxysmal nocturnal hemoglobinuria (PNH), atypical hemolytic uremic syndrome (aHUS) or myasthenia gravis (MG). In the methods of the invention the cell may be contacted with the siRNA in vitro or in vivo, i.e., the cell may be within a subject.

[0659] A cell suitable for treatment using the methods of the invention may be any cell that expresses a C9 gene, e.g., a liver cell. A cell suitable for use in the methods of the invention may be a mammalian cell, e.g., a primate cell (such as a human cell, including human cell in a chimeric non-human animal, or a non-human primate cell, e.g., a monkey cell or a chimpanzee cell), or a non-primate cell. In certain embodiments, the cell is a human cell, e.g., a human liver cell. In the methods of the invention, C9 expression is inhibited in the cell by at least 50, 55, 60, 65, 70, 75, 80, 85, 90, or 95, or to a level below the level of detection of the assay.

[0660] The in vivo methods of the invention may include administering to a subject a composition containing an iRNA, where the iRNA includes a nucleotide sequence that is complementary to at least a part of an RNA transcript of the C9 gene of the mammal to which the RNAi agent is to be administered. The composition can be administered by any means known in the art including, but not limited to oral, intraperitoneal, or parenteral routes, including intracranial (e.g., intraventricular, intraparenchymal, and intrathecal), intravenous, intramuscular, subcutaneous, transdermal, airway (aerosol), nasal, rectal, and topical (including buccal and sublingual) administration. In certain embodiments, the compositions are administered by intravenous infusion or injection. In certain embodiments, the compositions are administered by subcutaneous injection. In certain embodiments, the compositions are administered by intramuscular injection.

[0661] In one aspect, the present invention also provides methods for inhibiting the expression of a C9 gene in a mammal. The methods include administering to the mammal a composition comprising a dsRNA that targets a complement component 9 gene in a cell of the mammal and maintaining the mammal for a time sufficient to obtain degradation of the mRNA transcript of the C9 gene, thereby inhibiting expression of the C9 gene in the cell. Reduction in gene expression can be assessed by any methods known in the art and by methods, e.g. qRT-PCR, described herein, e.g., in Example 2. Reduction in protein production can be assessed by any methods known it the art, e.g. ELISA. In certain embodiments, a puncture liver biopsy sample serves as the tissue material for monitoring the reduction in the C9 gene or protein expression. In other embodiments, a blood sample serves as the subject sample for monitoring the reduction in the C9 protein expression.

[0662] The present invention further provides methods of treatment in a subject in need thereof, e.g., a subject diagnosed with a C9-associated disorder, such as, paroxysmal nocturnal hemoglobinuria (PNH), atypical hemolytic uremic syndrome (aHUS) or myasthenia gravis (MG). The present invention further provides methods of prophylaxis in a subject in need thereof. The treatment methods of the invention include administering an iRNA of the invention to a subject, e.g., a subject that would benefit from a reduction of C9 expression, in a prophylactically effective amount of an iRNA targeting a C9 gene or a pharmaceutical composition comprising an iRNA targeting a C9 gene.

[0663] In one embodiment, a complement C9-associated disease is selected from the group consisting of paroxysmal nocturnal hemoglobinuria (PNH), atypical hemolytic uremic syndrome (aHUS), myasthenia gravis (MG), macular degeneration (e.g., age-related macular degeneration), asthma, rheumatoid arthritis, systemic lupus erythmatosis, glomerulonephritis, psoriasis, dermatomyositis bullous pemphigoid, Shiga toxin E. coli-related hemolytic uremic syndrome, neuromyelistis optica, dense deposit disease, C3 neuropathy, cold agglutinin disease, anti-neutrophil cytoplasmic antibody-associated vasculitis, humoral and vascular transplant rejection, graft dysfunction, myocardial infarction, a sensitized recipient of a transplant, and sepsis.

[0664] In one embodiment, a subject having a C9-associated disease has paroxysmal nocturnal hemoglobinuria (PNH). In another embodiment, a subject having a C9-associated disease has atypical hemolytic uremic syndrome (aHUS). In another embodiment, a subject having a C9-associated disease has myasthenia gravis (MG).

[0665] An iRNA of the invention may be administered as a “free iRNA.” A free iRNA is administered in the absence of a pharmaceutical composition. The naked iRNA may be in a suitable buffer solution. The buffer solution may comprise acetate, citrate, prolamine, carbonate, or phosphate, or any combination thereof. In one embodiment, the buffer solution is phosphate buffered saline (PBS). The pH and osmolarity of the buffer solution containing the iRNA can be adjusted such that it is suitable for administering to a subject.

[0666] Alternatively, an iRNA of the invention may be administered as a pharmaceutical composition, such as a dsRNA liposomal formulation.

[0667] Subjects that would benefit from an inhibition of C9 gene expression are subjects susceptible to or diagnosed with a C9-associated disorder, such as paroxysmal nocturnal hemoglobinuria (PNH, atypical hemolytic uremic syndrome (aHUS) or myasthenia gravis (MG).

[0668] In an embodiment, the method includes administering a composition featured herein such that expression of the target C9 gene is decreased, such as for about 1, 2, 3, 4, 5, 6, 1-6, 1-3, or 3-6 months per dose. In certain embodiments, the composition is administered once every 3-6 months.

[0669] Preferably, the iRNAs useful for the methods and compositions featured herein specifically target RNAs (primary or processed) of the target C9 gene. Compositions and methods for inhibiting the expression of these genes using iRNAs can be prepared and performed as described herein.

[0670] Administration of the iRNA according to the methods of the invention may result prevention or treatment of a C9-associated disorder, e.g., paroxysmal nocturnal hemoglobinuria (PNH, atypical hemolytic uremic syndrome (aHUS) or myasthenia gravis (MG).

[0671] Subjects can be administered a therapeutic amount of iRNA, such as about 0.01 mg/kg to about 200 mg/kg.

[0672] The iRNA is administered subcutaneously, i.e., by subcutaneous injection. The iRNA is administered intravenously, i.e., by intravenous injection. One or more injections may be used to deliver the desired dose of iRNA to a subject. The injections may be repeated over a period of time.

[0673] The administration may be repeated on a regular basis. In certain embodiments, after an initial treatment regimen, the treatments can be administered on a less frequent basis. A repeat-dose regimen may include administration of a therapeutic amount of iRNA on a regular basis, such as once per month to once a year. In certain embodiments, the iRNA is administered about once per month to about once every three months, or about once every three months to about once every six months.

[0674] The invention further provides methods and uses of an iRNA agent or a pharmaceutical composition thereof for treating a subject that would benefit from reduction and/or inhibition of C9 gene expression, e.g., a subject having a C9-associated disease, in combination with other pharmaceuticals and/or other therapeutic methods, e.g., with known pharmaceuticals and/or known therapeutic methods, such as, for example, those which are currently employed for treating these disorders.

[0675] Accordingly, in some aspects of the invention, the methods which include either a single iRNA agent of the invention, further include administering to the subject one or more additional therapeutic agents.

[0676] The iRNA agent and an additional therapeutic agent and/or treatment may be administered at the same time and/or in the same combination, e.g., parenterally, or the additional therapeutic agent can be administered as part of a separate composition or at separate times and/or by another method known in the art or described herein.

[0677] In some aspects, the additional therapeutic agent is an iRNA agent targeting a C5 gene, such as described in U.S. Provisional Patent Application No. 61/782,531, filed on Mar. 14, 2013, U.S. Provisional Patent Application No. 61/837,3991, filed on Jun. 20, 2013, and U.S. Provisional Patent Application No. 61/904,579, filed on Nov. 15, 2013, the entire contents of each of which are hereby incorporated herein by reference.

[0678] In other aspects, the additional therapeutic agent is an anti-complement component C5 antibody, or antigen-binding fragment thereof (e.g., eculizumab). Eculizumab is a humanized monoclonal IgG2/4, kappa light chain antibody that specifically binds complement component C5 with high affinity and inhibits cleavage of C5 to C5a and C5b, thereby inhibiting the generation of the terminal complement complex C5b-9. Eculizumab is described in U.S. Pat. No. 6,355,245, the entire contents of which are incorporated herein by reference.

[0679] In yet other aspects, the additional therapeutic is a C3 peptide inhibitor, or analog thereof. In one embodiment, the C3 peptide inhibitor is compstatin. Compstatin is a cyclic tridecapeptide with potent and selective C3 inhibitory activity. Compstatin, and its analogs, are described in U.S. Pat. Nos. 7,888,323, 7,989,589, and 8,442,776, in U.S. Patent Publication No. 2012/0178694 and 2013/0053302, and in PCT Publication Nos. WO 2012/174055, WO 2012/2178083, WO 2013/036778, the entire contents of each of which are incorporated herein by reference.

[0680] Additional therapeutics suitable for use in the methods of the invention include, for example, plasmaphoresis, thrombolytic therapy (e.g., streptokinase), antiplatelet agents, folic acid, corticosteroids; immunosuppressive agents; estrogens, methotrexate, 6-MP, azathioprine sulphasalazine, mesalazine, olsalazine, chloroquinine/hydroxychloroquine, pencillamine, aurothiomalate (intramuscular and oral), azathioprine, cochicine, corticosteroids (oral, inhaled and local injection), beta-2 adrenoreceptor agonists (salbutamol, terbutaline, salmeteral), xanthines (theophylline, aminophylline), cromoglycate, nedocromil, ketotifen, ipratropium and oxitropium, cyclosporin, FK506, rapamycin, mycophenolate mofetil, leflunomide, NSAIDs, for example, ibuprofen, corticosteroids such as prednisolone, phosphodiesterase inhibitors, adensosine agonists, antithrombotic agents, complement inhibitors, adrenergic agents, agents which interfere with signalling by proinflammatory cytokines, such as TNF-α or IL-1 (e.g., IRAK, NIK, IKK, p38 or MAP kinase inhibitors), IL-1β converting enzyme inhibitors, TNFa converting enzyme (TACE) inhibitors, T-cell signalling inhibitors, such as kinase inhibitors, metalloproteinase inhibitors, sulfasalazine, azathioprine, 6-mercaptopurines, angiotensin converting enzyme inhibitors, soluble cytokine receptors and derivatives thereof (e.g., soluble p55 or p75 TNF receptors and the derivatives p75TNFRIgG (Enbrel™ and p55TNFRIgG (Lenercept)), sIL-1RI, sIL-1RII, and sIL-6R), antiinflammatory cytokines (e.g., IL-4, IL-10, IL-11, IL-13 and TGFO), celecoxib, folic acid, hydroxychloroquine sulfate, rofecoxib, etanercept, infliximonoclonal antibody, naproxen, valdecoxib, sulfasalazine, methylprednisolone, meloxicam, methylprednisolone acetate, gold sodium thiomalate, aspirin, triamcinolone acetonide, propoxyphene napsylate/apap, folate, nabumetone, diclofenac, piroxicam, etodolac, diclofenac sodium, oxaprozin, oxycodone hydrochloride, hydrocodone bitartrate/apap, diclofenac sodium/misoprostol, fentanyl, anakinra, human recombinant, tramadol hydrochloride, salsalate, sulindac, cyanocobalamin/folic acid/pyridoxine, acetaminophen, alendronate sodium, prednisolone, morphine sulfate, lidocaine hydrochloride, indomethacin, glucosamine sulf/chondroitin, amitriptyline hydrochloride, sulfadiazine, oxycodone hydrochloride/acetaminophen, olopatadine hydrochloride, misoprostol, naproxen sodium, omeprazole, cyclophosphamide, rituximonoclonal antibody, IL-1 TRAP, MRA, CTLA4-IG, IL-18 BP, anti-IL-18, Anti-IL15, BIRB-796, SCIO-469, VX-702, AMG-548, VX-740, Roflumilast, IC-485, CDC-801, Mesopram, cyclosporine, cytokine suppressive anti-inflammatory drug(s) (CSAIDs); CDP-571/BAY-10-3356 (humanized anti-TNFQ antibody; Celltech/Bayer); cA2/infliximonoclonal antibody (chimeric anti-TNFat antibody; Centocor); 75 kdTNFR-IgG/etanercept (75 kD TNF receptor-IgG fusion protein; Immunex; see e.g., (1994) Arthr. Rheum. 37: S295; (1996) J. Invest. Med. 44: 235A); 55 kdTNF-IgG (55 kD TNF receptor-IgG fusion protein; Hoffmann-LaRoche); IDEC-CE9.1/SB 210396 (non-depleting primatized anti-CD4 antibody; IDEC/SmithKline; see e.g., (1995) Arthr. Rheum. 38: S185); DAB 486-IL-2 and/or DAB 389-IL-2 (IL-2 fusion proteins; Seragen; see e.g., (1993) Arthrit. Rheum. 36: 1223); Anti-Tac (humanized anti-IL-2Rα; Protein Design Labs/Roche); IL-4 (anti-inflammatory cytokine; DNAX/Schering); IL-10 (SCH 52000; recombinant IL-10, anti-inflammatory cytokine; DNAX/Schering); IL-4; IL-10 and/or IL-4 agonists (e.g., agonist antibodies); IL-iRA (IL-1 receptor antagonist; Synergen/Amgen); anakinra (Kineret®/Amgen); TNF-bp/s-TNF (soluble TNF binding protein; see e.g., (1996) Arthr. Rheum. 39(9 (supplement)): S284; (1995) Amer. J. Physiol.-Heart and Circ. Physiol. 268: 37-42); R973401 (phosphodiesterase Type IV inhibitor; see e.g., (1996) Arthr. Rheum. 39(9 (supplement): S282); MK-966 (COX-2 Inhibitor; see e.g., (1996) Arthr. Rheum. 39(9 (supplement): S81); Iloprost (see e.g., (1996) Arthr. Rheum. 39(9 (supplement): S82); methotrexate; thalidomide (see e.g., (1996) Arthr. Rheum. 39(9 (supplement): S282) and thalidomide-related drugs (e.g., Celgen); leflunomide (anti-inflammatory and cytokine inhibitor; see e.g., (1996) Arthr. Rheum. 39(9 (supplement): S131; (1996) Inflamm. Res. 45: 103-107); tranexamic acid (inhibitor of plasminogen activation; see e.g., (1996) Arthr. Rheum. 39(9 (supplement): S284); T-614 (cytokine inhibitor; see e.g., (1996) Arthr. Rheum. 39(9 (supplement): S282); prostaglandin E1 (see e.g., (1996) Arthr. Rheum. 39(9 (supplement): S282); Tenidap (non-steroidal anti-inflammatory drug; see e.g., (1996) Arthr. Rheum. 39(9 (supplement): S280); Naproxen (non-steroidal anti-inflammatory drug; see e.g., (1996) Neuro. Report 7: 1209-1213); Meloxicam (non-steroidal anti-inflammatory drug); Ibuprofen (non-steroidal anti-inflammatory drug); Piroxicam (non-steroidal anti-inflammatory drug); Diclofenac (non-steroidal anti-inflammatory drug); Indomethacin (non-steroidal anti-inflammatory drug); Sulfasalazine (see e.g., (1996) Arthr. Rheum. 39(9 (supplement): S281); Azathioprine (see e.g., (1996) Arthr. Rheum. 39(9 (supplement): 5281); ICE inhibitor (inhibitor of the enzyme interleukin-1 converting enzyme); zap-70 and/or lck inhibitor (inhibitor of the tyrosine kinase zap-70 or lck); VEGF inhibitor and/or VEGF-R inhibitor (inhibitors of vascular endothelial cell growth factor or vascular endothelial cell growth factor receptor; inhibitors of angiogenesis); corticosteroid anti-inflammatory drugs (e.g., SB203580); TNF-convertase inhibitors; anti-IL-12 antibodies; anti-IL-18 antibodies; interleukin-11 (see e.g., (1996) Arthr. Rheum. 39(9 (supplement): S296); interleukin-13 (see e.g., (1996) Arthr. Rheum. 39(9 (supplement): S308); interleukin-17 inhibitors (see e.g., (1996) Arthr. Rheum. 39(9 (supplement): S120); gold; penicillamine; chloroquine; chlorambucil; hydroxychloroquine; cyclosporine; cyclophosphamide; total lymphoid irradiation; anti-thymocyte globulin; anti-CD4 antibodies; CD5-toxins; orally-administered peptides and collagen; lobenzarit disodium; Cytokine Regulating Agents (CRAs) HP228 and HP466 (Houghten Pharmaceuticals, Inc.); ICAM-1 antisense phosphorothioate oligo-deoxynucleotides (ISIS 2302; Isis Pharmaceuticals, Inc.); soluble complement receptor 1 (TP10; T Cell Sciences, Inc.); prednisone; orgotein; glycosaminoglycan polysulphate; minocycline; anti-IL2R antibodies; marine and botanical lipids (fish and plant seed fatty acids; see e.g., DeLuca et al. (1995) Rheum. Dis. Clin. North Am. 21: 759-777); auranofin; phenylbutazone; meclofenamic acid; flufenamic acid; intravenous immune globulin; zileuton; azaribine; mycophenolic acid (RS-61443); tacrolimus (FK-506); sirolimus (rapamycin); amiprilose (therafectin); cladribine (2-chlorodeoxyadenosine); methotrexate; bcl-2 inhibitors (see Bruncko, M. et al. (2007) J. Med. Chem. 50(4): 641-662); antivirals and immune-modulating agents, small molecule inhibitor of KDR, small molecule inhibitor of Tie-2; methotrexate; prednisone; celecoxib; folic acid; hydroxychloroquine sulfate; rofecoxib; etanercept; infliximonoclonal antibody; leflunomide; naproxen; valdecoxib; sulfasalazine; methylprednisolone; ibuprofen; meloxicam; methylprednisolone acetate; gold sodium thiomalate; aspirin; azathioprine; triamcinolone acetonide; propxyphene napsylate/apap; folate; nabumetone; diclofenac; piroxicam; etodolac; diclofenac sodium; oxaprozin; oxycodone hcl; hydrocodone bitartrate/apap; diclofenac sodium/misoprostol; fentanyl; anakinra, human recombinant; tramadol hcl; salsalate; sulindac; cyanocobalamin/fa/pyridoxine; acetaminophen; alendronate sodium; prednisolone; morphine sulfate; lidocaine hydrochloride; indomethacin; glucosamine sulfate/chondroitin; cyclosporine; amitriptyline hydrochloride; sulfadiazine; oxycodone hcl/acetaminophen; olopatadine hcl; misoprostol; naproxen sodium; omeprazole; mycophenolate mofetil; cyclophosphamide; rituximonoclonal antibody; IL-1 TRAP; MRA; CTLA4-IG; IL-18 BP; IL-12/23; anti-IL 18; anti-IL 15; BIRB-796; SCIO-469; VX-702; AMG-548; VX-740; Roflumilast; IC-485; CDC-801; mesopram, albuterol, salmeterol/fluticasone, montelukast sodium, fluticasone propionate, budesonide, prednisone, salmeterol xinafoate, levalbuterol hcl, albuterol sulfate/ipratropium, prednisolone sodium phosphate, triamcinolone acetonide, beclomethasone dipropionate, ipratropium bromide, azithromycin, pirbuterol acetate, prednisolone, theophylline anhydrous, methylprednisolone sodium succinate, clarithromycin, zafirlukast, formoterol fumarate, influenza virus vaccine, methylprednisolone, amoxicillin trihydrate, flunisolide, allergy injection, cromolyn sodium, fexofenadine hydrochloride, flunisolide/menthol, amoxicillin/clavulanate, levofloxacin, inhaler assist device, guaifenesin, dexamethasone sodium phosphate, moxifloxacin hcl, doxycycline hyclate, guaifenesin/d-methorphan, p-ephedrine/cod/chlorphenir, gatifloxacin, cetirizine hydrochloride, mometasone furoate, salmeterol xinafoate, benzonatate, cephalexin, pe/hydrocodone/chlorphenir, cetirizine hcl/pseudoephed, phenylephrine/cod/promethazine, codeine/promethazine, cefprozil, dexamethasone, guaifenesin/pseudoephedrine, chlorpheniramine/hydrocodone, nedocromil sodium, terbutaline sulfate, epinephrine, methylprednisolone, metaproterenol sulfate, aspirin, nitroglycerin, metoprolol tartrate, enoxaparin sodium, heparin sodium, clopidogrel bisulfate, carvedilol, atenolol, morphine sulfate, metoprolol succinate, warfarin sodium, lisinopril, isosorbide mononitrate, digoxin, furosemide, simvastatin, ramipril, tenecteplase, enalapril maleate, torsemide, retavase, losartan potassium, quinapril hcl/mag carb, bumetanide, alteplase, enalaprilat, amiodarone hydrochloride, tirofiban hcl m-hydrate, diltiazem hydrochloride, captopril, irbesartan, valsartan, propranolol hydrochloride, fosinopril sodium, lidocaine hydrochloride, eptifibatide, cefazolin sodium, atropine sulfate, aminocaproic acid, spironolactone, interferon, sotalol hydrochloride, potassium chloride, docusate sodium, dobutamine hcl, alprazolam, pravastatin sodium, atorvastatin calcium, midazolam hydrochloride, meperidine hydrochloride, isosorbide dinitrate, epinephrine, dopamine hydrochloride, bivalirudin, rosuvastatin, ezetimibe/simvastatin, avasimibe, and cariporide.

[0681] In one embodiment, an iRNA agent is administered in combination with a C5 inhibitor. In one embodiment, the C5 inhibitor is an anti-C5 monoclonal antibody, e.g., eculizumab. In another embodiment, an iRNA agent is administered in combination with a C3 inhibitor. In one embodiment, the C3 inhibitor is a C3 peptide inhibitor, e.g., compstatin. In one embodiment, the iRNA agent is administered to the patient, and then the additional therapeutic agent is administered to the patient (or vice versa). In another embodiment, the iRNA agent and the additional therapeutic agent are administered at the same time.

[0682] The iRNA agent and an additional therapeutic agent and/or treatment may be administered at the same time and/or in the same combination, e.g., parenterally, or the additional therapeutic agent can be administered as part of a separate composition or at separate times and/or by another method known in the art or described herein.

### VIII. Kits

[0683] In certain aspects, the instant disclosure provides kits that include a suitable container containing a pharmaceutical formulation of a siRNA compound, e.g., a double-stranded siRNA compound, or ssiRNA compound, (e.g., a precursor, e.g., a larger siRNA compound which can be processed into a ssiRNA compound, or a DNA which encodes an siRNA compound, e.g., a double-stranded siRNA compound, or ssiRNA compound, or precursor thereof).

[0684] Such kits include one or more dsRNA agent(s) and instructions for use, e.g., instructions for administering a prophylactically or therapeutically effective amount of a dsRNA agent(s). The dsRNA agent may be in a vial or a pre-filled syringe. The kits may optionally further comprise means for administering the dsRNA agent (e.g., an injection device, such as a pre-filled syringe), or means for measuring the inhibition of C9 (e.g., means for measuring the inhibition of C9 mRNA, C9 protein, and/or C9 activity). Such means for measuring the inhibition of C9 may comprise a means for obtaining a sample from a subject, such as, e.g., a plasma sample. The kits of the invention may optionally further comprise means for determining the therapeutically effective or prophylactically effective amount.

[0685] In certain embodiments the individual components of the pharmaceutical formulation may be provided in one container, e.g., a vial or a pre-filled syringe. Alternatively, it may be desirable to provide the components of the pharmaceutical formulation separately in two or more containers, e.g., one container for a siRNA compound preparation, and at least another for a carrier compound. The kit may be packaged in a number of different configurations such as one or more containers in a single box. The different components can be combined, e.g., according to instructions provided with the kit. The components can be combined according to a method described herein, e.g., to prepare and administer a pharmaceutical composition. The kit can also include a delivery device.

[0686] This invention is further illustrated by the following examples which should not be construed as limiting. The entire contents of all references, patents and published patent applications cited throughout this application, as well as the informal Sequence Listing and FIGURES, are hereby incorporated herein by reference.

### EXAMPLES

### Example 1. iRNA Synthesis

### Source of Reagents

[0687] Where the source of a reagent is not specifically given herein, such reagent can be obtained from any supplier of reagents for molecular biology at a quality/purity standard for application in molecular biology.

siRNA Design

[0688] siRNAs targeting the human complement component 9 (C9) gene (human: NCBI refseqID NM_001737.5; NCBI GeneID: 735) were designed using custom R and Python scripts. The human NM_001737.5 REFSEQ mRNA, has a length of 2770 bases.

[0689] Detailed lists of the unmodified C9 sense and antisense strand nucleotide sequences are shown in Table 2. Detailed lists of the modified C9 sense and antisense strand nucleotide sequences are shown in Table 3.

[0690] It is to be understood that, throughout the application, a duplex name without a decimal is equivalent to a duplex name with a decimal which merely references the batch number of the duplex. For example, AD-959917 is equivalent to AD-959917.1.

siRNA Synthesis

[0691] siRNAs were synthesized and annealed using routine methods known in the art.

[0692] Briefly, siRNA sequences were synthesized on a 1 μmol scale using a Mermade 192 synthesizer (BioAutomation) with phosphoramidite chemistry on solid supports. The solid support was controlled pore glass (500-1000 Å) loaded with a custom GalNAc ligand (3′-GalNAc conjugates), universal solid support (AM Chemicals), or the first nucleotide of interest. Ancillary synthesis reagents and standard 2-cyanoethyl phosphoramidite monomers (2′-deoxy-2′-fluoro, 2′-O-methyl, RNA, DNA) were obtained from Thermo-Fisher (Milwaukee, WI), Hongene (China), or Chemgenes (Wilmington, MA, USA). Additional phosphoramidite monomers were procured from commercial suppliers, prepared in-house, or procured using custom synthesis from various CMOs. Phosphoramidites were prepared at a concentration of 100 mM in either acetonitrile or 9:1 acetonitrile:DMF and were coupled using 5-Ethylthio-1H-tetrazole (ETT, 0.25 M in acetonitrile) with a reaction time of 400 s. Phosphorothioate linkages were generated using a 100 mM solution of 3-((Dimethylamino-methylidene) amino)-3H-1,2,4-dithiazole-3-thione (DDTT, obtained from Chemgenes (Wilmington, MA, USA)) in anhydrous acetonitrile/pyridine (9:1 v/v). Oxidation time was 5 minutes. All sequences were synthesized with final removal of the DMT group (“DMT-Off”).

[0693] Upon completion of the solid phase synthesis, solid-supported oligoribonucleotides were treated with 300 μL of Methylamine (40% aqueous) at room temperature in 96 well plates for approximately 2 hours to afford cleavage from the solid support and subsequent removal of all additional base-labile protecting groups. For sequences containing any natural ribonucleotide linkages (2′-OH) protected with a tert-butyl dimethyl silyl (TBDMS) group, a second deprotection step was performed using TEA.3HF (triethylamine trihydrofluoride). To each oligonucleotide solution in aqueous methylamine was added 200 μL of dimethyl sulfoxide (DMSO) and 300 μL TEA.3HF and the solution was incubated for approximately 30 mins at 60° C. After incubation, the plate was allowed to come to room temperature and crude oligonucleotides were precipitated by the addition of 1 mL of 9:1 acetontrile:ethanol or 1:1 ethanol:isopropanol. The plates were then centrifuged at 4° C. for 45 mins and the supernatant carefully decanted with the aid of a multichannel pipette. The oligonucleotide pellet was resuspended in 20 mM NaOAc and subsequently desalted using a HiTrap size exclusion column (5 mL, GE Healthcare) on an Agilent LC system equipped with an autosampler, UV detector, conductivity meter, and fraction collector. Desalted samples were collected in 96 well plates and then analyzed by LC-MS and UV spectrometry to confirm identity and quantify the amount of material, respectively.

[0694] Duplexing of single strands was performed on a Tecan liquid handling robot. Sense and antisense single strands were combined in an equimolar ratio to a final concentration of 10 μM in 1×PBS in 96 well plates, the plate sealed, incubated at 100° C. for 10 minutes, and subsequently allowed to return slowly to room temperature over a period of 2-3 hours. The concentration and identity of each duplex was confirmed and then subsequently utilized for in vitro screening assays.

### Example 2. In Vitro Screening Methods

### Cell Culture and 96-Well Transfections

[0695] Hepa1-6 cells (ATCC, Manassas, VA) were grown to near confluence at 37° C. in an atmosphere of 5% CO₂ in Eagle's Minimum Essential Medium (Gibco) supplemented with 10% FBS (ATCC) before being released from the plate by trypsinization. Dual-Glo® Luciferase constructs were generated in the psiCHECK2 plasmid containing the human C9 genomic sequence. Each dual-luciferase plasmid was co-transfected with siRNA (Tables 2 and 3) into approximately 2×10⁴ cells using Lipofectamine 2000 (Invitrogen, Carlsbad CA. cat #11668-019). For each well of a 96 well plate, 0.5 μl of Lipofectamine was added to 100 ng of plasmid vector and a single siRNA (Tables 2 and 3) in 14.8 μl of Opti-MEM and allowed to complex at room temperature for 15 minutes. The mixture was then added to the cells which were resuspended in 80 μl of fresh complete media. Cells were incubated for 24 hours before luciferase was measured. Single dose experiments were performed at 10 nM final duplex concentration.

### Dual-Glo® Luciferase Assay

[0696] Forty-eight hours after the siRNAs were transfected, Firefly (transfection control) and Rinella (fused to C9 target sequence) luciferase were measured. First, media was removed from cells. Then Firefly luciferase activity was measured by adding 75 μl of Dual-Glo® Luciferase Reagent equal to the culture medium volume to each well and mix. The mixture was incubated at room temperature for 30 minutes before lunimescense (500 nm) was measured on a Spectramax (Molecular Devices) to detect the Firefly luciferase signal. Renilla luciferase activity was measured by adding 75 μl of room temperature Dual-Glo® Stop & Glo® Reagent to each well and the plates were incubated for 10-15 minutes before luminescence was again measured to determine the Renilla luciferase signal. The Dual-Glo® Stop & Glo® Reagent, quenches the firefly luciferase signal and sustaines luminescence for the Renilla luciferase reaction. siRNA activity was determined by normalizing the Renilla (C9) signal to the Firefly (control) signal within each well. The magnitude of siRNA activity was then assessed relative to cells that were transfected with the same vector but were not treated with siRNA or were treated with a non-targeting siRNA. All transfections were done in quadruplicates.

[0697] Table 4 shows the results of a single dose screen in Hepa1-6 cells transfected with the indicated agents in Tables 2 and 3.

TABLE 1
Abbreviations of nucleotide monomers used in
nucleic acid sequence representation. It will
be understood that these monomers, when present in
an oligonucleotide, are mutually linked by 5′-3′-
phosphodiester bonds.

| Abbreviation | Nucleotide(s) |
|---|---|
| A | Adenosine-3'-phosphate |
| Ab | beta-L-adenosine-3\grave{ }-phosphate |
| Abs | beta-L-adenosine-3\grave{ }-phosphorothioate |
| Af | 2'-fluoroadenosine-3'-phosphate |
| Afs | 2'-fluoroadenosine-3'-phosphorothioate |
| As | adenosine-3'-phosphorothioate |
| C | cytidine-3'-phosphate |
| Cb | beta-L-cytidine-3\grave{ }-phosphate |
| Cbs | beta-L-cytidine-3′-phosphorothioate |
| Cf | 2'-fluorocytidine-3'-phosphate |
| Cfs | 2'-fluorocytidine-3'-phosphorothioate |
| Cs | cytidine-3'-phosphorothioate |
| G | guanosine-3'-phosphate |
| Gb | beta-L-guanosine-3\grave{ }-phosphate |
| Gbs | beta-L-guanosine-3\grave{ }-phosphorothioate |
| Gf | 2'-fluoroguanosine-3'-phosphate |
| Gfs | 2'-fluoroguanosine-3'-phosphorothioate |
| Gs | guanosine-3'-phosphorothioate |
| T | 5'-methyluridine-3'-phosphate |
| Tf | 2'-fluoro-5-methyluridine-3'-phosphate |
| Tfs | 2'-fluoro-5-methyluridine-3'-phosphorothioate |
| Ts | 5-methyluridine-3'-phosphorothioate |
| U | Uridine-3'-phosphate |
| Uf | 2'-fluorouridine-3'-phosphate |
| Ufs | 2'-fluorouridine-3'-phosphorothioate |
| Us | uridine-3'-phosphorothioate |
| N | any nucleotide, modified or unmodified |
| a | 2′-O-methyladenosine-3'-phosphate |
| as | 2′-O-methyladenosine-3'-phosphorothioate |
| c | 2′-O-methylcytidine-3'-phosphate |
| cs | 2′-O-methylcytidine-3'-phosphorothioate |
| g | 2′-O-methylguanosine-3'-phosphate |
| gs | 2′-O-methylguanosine-3'-phosphorothioate |
| t | 2'-O-methyl-5-methyluridine-3'-phosphate |
| ts | 2'-O-methyl-5-methyluridine-3'-phosphorothioate |
| u | 2′-O-methyluridine-3'-phosphate |
| us | 2′-O-methyluridine-3'-phosphorothioate |
| s | phosphorothioate linkage |
| L10 | N-(cholesterylcarboxamidocaproyl)- |
| | 4-hydroxyprolinol (Hyp-C6-Chol) |
| L96 | N-[tris(GalNAc-alkyl)- |
| | amidodecanoyl)]-4-hydroxyprolinol |
| | (Hyp-(GalNAc-alkyl)3) |
| Y34 | 2-hydroxymethyl-tetrahydrofurane-4- |
| | methoxy-3-phosphate (abasic 2′-OMe |
| | furanose) |
| Y44 | inverted abasic DNA (2-hydroxymethyl- |
| | tetrahydrofurane-5-phosphate) |
| (Agn) | Adenosine-glycol nucleic acid (GNA) |
| (Cgn) | Cytidine-glycol nucleic acid (GNA) |
| (Ggn) | Guanosine-glycol nucleic acid (GNA) |
| (Tgn) | Thymidine-glycol nucleic acid (GNA) S-Isomer |
| P | Phosphate |
| VP | Vinyl-phosphonate |
| dA | 2\grave{ }-deoxyadenosine-3\grave{ }-phosphate |
| dAs | 2\grave{ }-deoxyadenosine-3\grave{ }-phosphorothioate |
| dC | 2\grave{ }-deoxycytidine-3\grave{ }-phosphate |
| dCs | 2\grave{ }-deoxycytidine-3\grave{ }-phosphorothioate |
| dG | 2\grave{ }-deoxyguanosine-3\grave{ }-phosphate |
| dGs | 2\grave{ }-deoxyguanosine-3\grave{ }-phosphorothioate |
| dT | 2\grave{ }-deoxythymidine-3\grave{ }-phosphate |
| dTs | 2\grave{ }-deoxythymidine-3\grave{ }-phosphorothioate |
| dU | 2\grave{ }-deoxyuridine |
| dUs | 2\grave{ }-deoxyuridine-3\grave{ }-phosphorothioate |
| (C2p) | cytidine-2\grave{ }-phosphate |
| (G2p) | guanosine-2\grave{ }-phosphate |
| (U2p) | uridine-2\grave{ }-phosphate |
| (A2p) | adenosine-2\grave{ }-phosphate |
| (Chd) | 2′-O-hexadecyl-cytidine-3'-phosphate |
| (Ahd) | 2′-O-hexadecyl-adenosine-3'-phosphate |
| (Ghd) | 2′-O-hexadecyl-guanosine-3'-phosphate |
| (Uhd) | 2′-O-hexadecyl-uridine-3'-phosphate |

TABLE 2
Unmodified Sense and Antisense Strand Sequences of C9 dsRNA Agents

| | | | | | mRNA | mRNA |
|---|---|---|---|---|---|---|
| | | | | | start | end |
| | | SEQ | | SEQ | site in | site in |
| Duplex | Sense Sequence | ID | Antisense Sequence | ID | NM_ | NM_ |
| Name | 5′ to 3′ | NO: | 5′ to 3′ | NO: | 001737.5 | 001737.5 |
| AD-1488255 | CAAGAGCAGCAUGUCAGCCUU | 14 | AAGGCUGACAUGCUGCUCUUGCU | 149 | 20 | 42 |
| AD-1488278 | GGAGCUUUGCAGUUGCAAUCU | 15 | AGAUUGCAACUGCAAAGCUCCGG | 150 | 43 | 65 |
| AD-1488294 | AAUCUGCAUUUUAGAAAUAAU | 16 | AUUAUUUCUAAAAUGCAGAUUGC | 151 | 59 | 81 |
| AD-1488306 | AGAAAUAAGCAUCCUCACAGU | 17 | ACUGUGAGGAUGCUUAUUUCUAA | 152 | 71 | 93 |
| AD-1488326 | CACAGUACACGACCAGUUAUU | 18 | AAUAACUGGUCGUGUACUGUGCU | 153 | 91 | 113 |
| AD-1488350 | CAGAGCUAACAGAAAGCAGUU | 19 | AACUGCUUUCUGUUAGCUCUGGG | 154 | 115 | 137 |
| AD-1488366 | CAGUGGCUCUGCAUCACACAU | 20 | AUGUGUGAUGCAGAGCCACUGCU | 155 | 131 | 153 |
| AD-1488378 | AUCACACAUAGACUGCAGAAU | 21 | AUUCUGCAGUCUAUGUGUGAUGC | 156 | 143 | 165 |
| AD-1488390 | GUGAAUGGUCACAAUGCGAUU | 22 | AAUCGCAUUGUGACCAUUCACUC | 157 | 175 | 197 |
| AD-1488404 | UGCGAUCCUUGUCUCAGACAU | 23 | AUGUCUGAGACAAGGAUCGCAUU | 158 | 189 | 211 |
| AD-1488417 | UCAGACAAAUGUUUCGUUCAU | 24 | AUGAACGAAACAUUUGUCUGAGA | 159 | 202 | 224 |
| AD-1488435 | CAAGAAGCAUUGAGGUCUUUU | 25 | AAAAGACCUCAAUGCUUCUUGAA | 160 | 220 | 242 |
| AD-1488454 | UGGACAAUUUAAUGGGAAAAU | 26 | AUUUUCCCAUUAAAUUGUCCAAA | 161 | 239 | 261 |
| AD-1488491 | GGAGACAGACGACAGUGUGUU | 27 | AACACACUGUCGUCUGUCUCCCA | 162 | 276 | 298 |
| AD-1488544 | CUGCGGAAAUGACUUUCAAUU | 28 | AAUUGAAAGUCAUUUCCGCAGUC | 163 | 329 | 351 |
| AD-1488556 | CUUUCAAUGCAGUACAGGCAU | 29 | AUGCCUGUACUGCAUUGAAAGUC | 164 | 341 | 363 |
| AD-1488576 | GAUGCAUAAAGAUGCGACUUU | 30 | AAAGUCGCAUCUUUAUGCAUCUG | 165 | 361 | 383 |
| AD-1488599 | UGUAAUGGUGACAAUGACUGU | 31 | ACAGUCAUUGUCACCAUUACACC | 166 | 384 | 406 |
| AD-1488621 | GAGACUUUUCAGAUGAGGAUU | 32 | AAUCCUCAUCUGAAAAGUCUCCG | 167 | 406 | 428 |
| AD-1488635 | GAGGAUGAUUGUGAAAGUGAU | 33 | AUCACUUUCACAAUCAUCCUCAU | 168 | 420 | 442 |
| AD-1488639 | CUGCAGAGACAGAGUGGUAGU | 34 | ACUACCACUCUGUCUCUGCAGGG | 169 | 452 | 474 |
| AD-1488652 | GUGGUAGAAGAGUCUGAGCUU | 35 | AAGCUCAGACUCUUCUACCACUC | 170 | 465 | 487 |
| AD-1488671 | UGGCACGAACAGCAGGCUAUU | 36 | AAUAGCCUGCUGUUCGUGCCAGC | 171 | 484 | 506 |
| AD-1488687 | CUAUGGGAUCAACAUUUUAGU | 37 | ACUAAAAUGUUGAUCCCAUAGCC | 172 | 500 | 522 |
| AD-1488704 | ACACCUUUUGACAAUGAGUUU | 38 | AAACUCAUUGUCAAAAGGUGUGC | 173 | 537 | 559 |
| AD-1488721 | GUUCUACAAUGGACUCUGUAU | 39 | AUACAGAGUCCAUUGUAGAACUC | 174 | 554 | 576 |
| AD-1488754 | UGGAAACACUCUGACAUACUU | 40 | AAGUAUGUCAGAGUGUUUCCAUC | 175 | 587 | 609 |
| AD-1488766 | GACAUACUACCGAAGACCUUU | 41 | AAAGGUCUUCGGUAGUAUGUCAG | 176 | 599 | 621 |
| AD-1488787 | GAACGUGGCUUCUUUGAUCUU | 42 | AAGAUCAAAGAAGCCACGUUCCA | 177 | 620 | 642 |
| AD-1488799 | UUUGAUCUAUGAAACCAAAGU | 43 | ACUUUGGUUUCAUAGAUCAAAGA | 178 | 632 | 654 |
| AD-1488833 | AACCGAACAUUACGAAGAACU | 44 | AGUUCUUCGUAAUGUUCGGUUCU | 179 | 668 | 690 |
| AD-1488847 | AAGAACAAAUUGAAGCAUUUU | 45 | AAAAUGCUUCAAUUUGUUCUUCG | 180 | 682 | 704 |
| AD-1488858 | AAGCAUUUAAAAGUAUCAUCU | 46 | AGAUGAUACUUUUAAAUGCUUCA | 181 | 694 | 716 |
| AD-1488871 | UAUCAUCCAAGAGAAGACAUU | 47 | AAUGUCUUCUCUUGGAUGAUACU | 182 | 707 | 729 |
| AD-1488882 | GAAGACAUCAAAUUUUAAUGU | 48 | ACAUUAAAAUUUGAUGUCUUCUC | 183 | 719 | 741 |
| AD-1488895 | UUUAAUGCAGCUAUAUCUCUU | 49 | AAGAGAUAUAGCUGCAUUAAAAU | 184 | 732 | 754 |
| AD-1488904 | AUAUCUCUAAAAUUUACACCU | 50 | AGGUGUAAAUUUUAGAGAUAUAG | 185 | 744 | 766 |
| AD-1488923 | CCACUGAAACAAAUAAAGCUU | 51 | AAGCUUUAUUUGUUUCAGUGGGU | 186 | 763 | 785 |
| AD-1488941 | CUGAACAAUGUUGUGAGGAAU | 52 | AUUCCUCACAACAUUGUUCAGCU | 187 | 781 | 803 |
| AD-1488953 | GUGAGGAAACAGCCUCCUCAU | 53 | AUGAGGAGGCUGUUUCCUCACAA | 188 | 793 | 815 |
| AD-1488965 | CCUCCUCAAUUUCUUUACAUU | 54 | AAUGUAAAGAAAUUGAGGAGGCU | 189 | 805 | 827 |
| AD-1488986 | GCAAGGGUAGUUUUCGGUUUU | 55 | AAAACCGAAAACUACCCUUGCCA | 190 | 826 | 848 |
| AD-1488998 | UUCGGUUUUCAUAUUCCAAAU | 56 | AUUUGGAAUAUGAAAACCGAAAA | 191 | 838 | 860 |
| AD-1489029 | AACUAUUUUUGUCAUAUUCUU | 57 | AAGAAUAUGACAAAAAUAGUUGG | 192 | 871 | 893 |
| AD-1489041 | AUAUUCUUCAAAGAAGGAAAU | 58 | AUUUCCUUCUUUGAAGAAUAUGA | 193 | 884 | 906 |
| AD-1489045 | AUGUUUCUGCAUGUGAAAGGU | 59 | ACCUUUCACAUGCAGAAACAUUU | 194 | 906 | 928 |
| AD-1489058 | UGAAAGGAGAAAUUCAUCUGU | 60 | ACAGAUGAAUUUCUCCUUUCACA | 195 | 919 | 941 |
| AD-1489074 | UCUGGGAAGAUUUGUAAUGAU | 61 | AUCAUUACAAAUCUUCCCAGAUG | 196 | 935 | 957 |
| AD-1489086 | UGUAAUGAGAAAUCGCGAUGU | 62 | ACAUCGCGAUUUCUCAUUACAAA | 197 | 947 | 969 |
| AD-1489098 | UCGCGAUGUUGUGCUCACAAU | 63 | AUUGUGAGCACAACAUCGCGAUU | 198 | 959 | 981 |
| AD-1489112 | UCACAACAACUUUUGUGGAUU | 64 | AAUCCACAAAAGUUGUUGUGAGC | 199 | 973 | 995 |
| AD-1489126 | GUGGAUGAUAUAAAAGCUUUU | 65 | AAAAGCUUUUAUAUCAUCCACAA | 200 | 987 | 1009 |
| AD-1489139 | AAGCUUUGCCAACUACCUAUU | 66 | AAUAGGUAGUUGGCAAAGCUUUU | 201 | 1000 | 1022 |
| AD-1489152 | UACCUAUGAAAAGGGAGAAUU | 67 | AAUUCUCCCUUUUCAUAGGUAGU | 202 | 1013 | 1035 |
| AD-1489175 | UUGCCUUUUUGGAAACCUAUU | 68 | AAUAGGUUUCCAAAAAGGCAAAA | 203 | 1036 | 1058 |
| AD-1489190 | CCUAUGGAACUCACUACAGUU | 69 | AACUGUAGUGAGUUCCAUAGGUU | 204 | 1051 | 1073 |
| AD-1489202 | ACUACAGUAGCUCUGGGUCUU | 70 | AAGACCCAGAGCUACUGUAGUGA | 205 | 1063 | 1085 |
| AD-1489214 | CUGGGUCUCUAGGAGGACUCU | 71 | AGAGUCCUCCUAGAGACCCAGAG | 206 | 1075 | 1097 |
| AD-1489231 | CUCUAUGAACUAAUAUAUGUU | 72 | AACAUAUAUUAGUUCAUAGAGUC | 207 | 1092 | 1114 |
| AD-1489247 | UGGAUAAAGCUUCCAUGAAGU | 73 | ACUUCAUGGAAGCUUUAUCCAAA | 208 | 1114 | 1136 |
| AD-1489264 | AAGCGGAAAGGUGUUGAACUU | 74 | AAGUUCAACACCUUUCCGCUUCA | 209 | 113 | 1153 |
| AD-1489276 | GUUGAACUAAAAGACAUAAAU | 75 | AUUUAUGUCUUUUAGUUCAACAC | 210 | 1143 | 1165 |
| AD-1489292 | UAAAGAGAUGCCUUGGGUAUU | 76 | AAUACCCAAGGCAUCUCUUUAUG | 211 | 1159 | 1181 |
| AD-1489309 | UAUCAUCUGGAUGUAUCUCUU | 77 | AAGAGAUACAUCCAGAUGAUACC | 212 | 1176 | 1198 |
| AD-1489322 | UAUCUCUGGCUUUCUCUGAAU | 78 | AUUCAGAGAAAGCCAGAGAUACA | 213 | 1189 | 1211 |
| AD-1489334 | UCUCUGAAAUCUCUGUUGGAU | 79 | AUCCAACAGAGAUUUCAGAGAAA | 214 | 1201 | 1223 |
| AD-1489351 | GGAGCUGAAUUUAAUAAAGAU | 80 | AUCUUUAUUAAAUUCAGCUCCAA | 215 | 1218 | 1240 |
| AD-1489362 | AAGAUGAUUGUGUAAAGAGGU | 81 | ACCUCUUUACACAAUCAUCUUUA | 216 | 1234 | 1256 |
| AD-1489369 | GGGUAGAGCUGUAAACAUCAU | 82 | AUGAUGUUUACAGCUCUACCCUC | 217 | 1259 | 1281 |
| AD-1489383 | ACAUCACCAGUGAAAACCUCU | 83 | AGAGGUUUUCACUGGUGAUGUUU | 218 | 1273 | 1295 |
| AD-1489400 | CUCAUAGAUGAUGUUGUUUCU | 84 | AGAAACAACAUCAUCUAUGAGGU | 219 | 1290 | 1312 |
| AD-1489413 | UUGUUUCACUCAUAAGAGGUU | 85 | AACCUCUUAUGAGUGAAACAACA | 220 | 1303 | 1325 |
| AD-1489434 | GAACCAGAAAAUAUGCAUUUU | 86 | AAAAUGCAUAUUUUCUGGUUCCA | 221 | 1324 | 1346 |
| AD-1489454 | GAACUGAAAGAAAAGCUUCUU | 87 | AAGAAGCUUUUCUUUCAGUUCAA | 222 | 1344 | 1366 |
| AD-1489475 | CGAGGAACCGUGAUUGAUGUU | 88 | AACAUCAAUCACGGUUCCUCGGA | 223 | 1365 | 1387 |
| AD-1489489 | UGAUGUGACUGACUUUGUCAU | 89 | AUGACAAAGUCAGUCACAUCAAU | 224 | 1379 | 1401 |
| AD-1489518 | CUUCCAUAAAUGAUGCUCCUU | 90 | AAGGAGCAUCAUUUAUGGAAGAG | 225 | 1408 | 1430 |
| AD-1489533 | CUCCUGUUCUCAUUAGUCAAU | 91 | AUUGACUAAUGAGAACAGGAGCA | 226 | 1423 | 1445 |
| AD-1489563 | CUAUAUAUAAUCUGGUUCCAU | 92 | AUGGAACCAGAUUAUAUAUAGGA | 227 | 1453 | 1475 |
| AD-1489575 | UGGUUCCAGUGAAAAUGAAAU | 93 | AUUUCAUUUUCACUGGAACCAGA | 228 | 1465 | 1487 |
| AD-1489599 | ACACCUAAAGAAACAAAACUU | 94 | AAGUUUUGUUUCUUUAGGUGUGC | 229 | 1490 | 1512 |
| AD-1489613 | AAAACUUGGAAAGAGCCAUUU | 95 | AAAUGGCUCUUUCCAAGUUUUGU | 230 | 1504 | 1526 |
| AD-1489627 | GCCAUUGAAGACUAUAUCAAU | 96 | AUUGAUAUAGUCUUCAAUGGCUC | 231 | 1518 | 1540 |
| AD-1489653 | UGUAAGAAAAUGCCACACAUU | 97 | AAUGUGUGGCAUUUUCUUACACU | 232 | 1547 | 1569 |
| AD-1489670 | CAUGCCAAAAUGGAGGUACAU | 98 | AUGUACCUCCAUUUUGGCAUGUG | 233 | 1564 | 1586 |
| AD-1489690 | GUGAUUCUAAUGGAUGGAAAU | 99 | AUUUCCAUCCAUUAGAAUCACUG | 234 | 1584 | 1606 |
| AD-1489702 | GAUGGAAAGUGUUUGUGUGCU | 100 | AGCACACAAACACUUUCCAUCCA | 235 | 1596 | 1618 |
| AD-1489715 | UGUGUGCCUGCCCAUUCAAAU | 101 | AUUUGAAUGGGCAGGCACACAAA | 236 | 1609 | 1631 |
| AD-1489727 | CAUUCAAAUUUGAGGGAAUUU | 102 | AAAUUCCCUCAAAUUUGAAUGGG | 237 | 1621 | 1643 |
| AD-1489748 | CCUGUGAAAUCAGUAAACAAU | 103 | AUUGUUUACUGAUUUCACAGGCA | 238 | 1642 | 1664 |
| AD-1489752 | AAUUUCUGAAGGAUUGCCAGU | 104 | ACUGGCAAUCCUUCAGAAAUUUU | 239 | 1664 | 1686 |
| AD-1489774 | AUAGAGCUGUUGGCUUCUCUU | 105 | AAGAGAAGCCAACAGCUCUAUUU | 240 | 1706 | 1728 |
| AD-1489801 | AGUGGAAGAAGAAAACACUAU | 106 | AUAGUGUUUUCUUCUUCCACUGG | 241 | 1733 | 1755 |
| AD-1489813 | AAACACUAGUACCUUCAGAUU | 107 | AAUCUGAAGGUACUAGUGUUUUC | 242 | 1745 | 1767 |
| AD-1489820 | CUGAAGAUAAUCUUAGCUGCU | 108 | AGCAGCUAAGAUUAUCUUCAGGG | 243 | 1772 | 1794 |
| AD-1489836 | CUGCCAAGUAAAUAGCAACAU | 109 | AUGUUGCUAUUUACUUGGCAGCU | 244 | 1788 | 1810 |
| AD-1489859 | UUCAUGAAAAUCCUACCAACU | 110 | AGUUGGUAGGAUUUUCAUGAAGC | 245 | 1811 | 1833 |
| AD-1489880 | UCUGAAGUCUCUUCUCUCUUU | 111 | AAAGAGAGAAGAGACUUCAGAGG | 246 | 1832 | 1854 |
| AD-1489892 | UCUCUCUUAGGUCUAUAAUUU | 112 | AAAUUAUAGACCUAAGAGAGAAG | 247 | 1844 | 1866 |
| AD-1489904 | CUUCCUUAAACUCCUGUGAUU | 113 | AAUCACAGGAGUUUAAGGAAGAA | 248 | 1879 | 1901 |
| AD-1489923 | CCUAAUGAGAAGUCAACAGUU | 114 | AACUGUUGACUUCUCAUUAGGGA | 249 | 1916 | 1938 |
| AD-1489937 | AACAGUGAAAUACGCCAGAAU | 115 | AUUCUGGCGUAUUUCACUGUUGA | 250 | 1930 | 1952 |
| AD-1489949 | CGCCAGAACUGCUUUAUCCCU | 116 | AGGGAUAAAGCAGUUCUGGCGUA | 251 | 1942 | 1964 |
| AD-1489962 | UUAUCCCACGGAAAAUGCCAU | 117 | AUGGCAUUUUCCGUGGGAUAAAG | 252 | 1955 | 1977 |
| AD-1489974 | AAAUGCCAAUCUCUUCUAAAU | 118 | AUUUAGAAGAGAUUGGCAUUUUC | 253 | 1967 | 1989 |
| AD-1489988 | UUCAAAGUAAUUUUCAAACGU | 119 | ACGUUUGAAAAUUACUUUGAAGU | 254 | 2031 | 2053 |
| AD-1490011 | UUGUAUGGUUAACAUAUUCUU | 120 | AAGAAUAUGUUAACCAUACAAAG | 255 | 2054 | 2076 |
| AD-1490030 | UGCCAGGUCCAUGACCACACU | 121 | AGUGUGGUCAUGGACCUGGCAGA | 256 | 2073 | 2095 |
| AD-1490043 | ACCACACGUCUGUACCAUGCU | 122 | AGCAUGGUACAGACGUGUGGUCA | 257 | 2086 | 2108 |
| AD-1490057 | CCAUGCAAUUUAACUCUUAUU | 123 | AAUAAGAGUUAAAUUGCAUGGUA | 258 | 2100 | 2122 |
| AD-1490077 | UUGGUUAUUUGCUUAGGUGUU | 124 | AACACCUAAGCAAAUAACCAAAC | 259 | 2139 | 2161 |
| AD-1490098 | CAUACAUUCAUUCAGCAAAUU | 125 | AAUUUGCUGAAUGAAUGUAUGCA | 260 | 2160 | 2182 |
| AD-1490127 | CAGCCACGUGCACAGCAGUUU | 126 | AAACUGCUGUGCACGUGGCUGGU | 261 | 2189 | 2211 |
| AD-1490142 | CAGUUGCUUUUACUAGUCUUU | 127 | AAAGACUAGUAAAAGCAACUGCU | 262 | 2204 | 2226 |
| AD-1490154 | CUAGUCUUAGCUCUACGAUUU | 128 | AAAUCGUAGAGCUAAGACUAGUA | 263 | 2216 | 2238 |
| AD-1490168 | ACGAUUUAAAUCCAUGUGUCU | 129 | AGACACAUGGAUUUAAAUCGUAG | 264 | 2230 | 2252 |
| AD-1490193 | ACUACUAGUUUACCAGAGGAU | 130 | AUCCUCUGGUAAACUAGUAGUUU | 265 | 2284 | 2306 |
| AD-1490214 | AAGGGAGAUAAAGAGGAGUUU | 131 | AAACUCCUCUUUAUCUCCCUUCA | 266 | 2307 | 2329 |
| AD-1490229 | GAGUUGGUUAAUGGGUACAAU | 132 | AUUGUACCCAUUAACCAACUCCU | 267 | 2322 | 2344 |
| AD-1490251 | AUCCAGUUAGAUGAAAGGAAU | 133 | AUUCCUUUCAUCUAACUGGAUUU | 268 | 2344 | 2366 |
| AD-1490264 | AAGGAAUAAUAUAGAUAGUGU | 134 | ACACUAUCUAUAUUAUUCCUUUC | 269 | 2358 | 2380 |
| AD-1490276 | GAUAGUGUUCAGUAGCAGAAU | 135 | AUUCUGCUACUGAACACUAUCUA | 270 | 2371 | 2393 |
| AD-1490293 | GAAUAGAAUGAACAUAAACUU | 136 | AAGUUUAUGUUCAUUCUAUUCUG | 271 | 2388 | 2410 |
| AD-1490314 | AAUUCCUUCUAUUUGAUCAUU | 137 | AAUGAUCAAAUAGAAGGAAUUUC | 272 | 2427 | 2449 |
| AD-1490336 | UAGUCCAACUUAAUACCUAGU | 138 | ACUAGGUAUUAAGUUGGACUAUA | 273 | 2476 | 2498 |
| AD-1490352 | CUAGCCUUAUGAGUUGUAUAU | 139 | AUAUACAACUCAUAAGGCUAGGU | 274 | 2492 | 2514 |
| AD-1490368 | UAUAAGGUAAGGUUACCUACU | 140 | AGUAGGUAACCUUACCUUAUACA | 275 | 2508 | 2530 |
| AD-1490381 | UACCUACCUGAGAAGCUGAUU | 141 | AAUCAGCUUCUCAGGUAGGUAAC | 276 | 2521 | 2543 |
| AD-1490394 | AGCUGAUUAACAUUGGUUGUU | 142 | AACAACCAAUGUUAAUCAGCUUC | 277 | 2534 | 2556 |
| AD-1490410 | UUGUACAAUCUUAUUCAUUAU | 143 | AUAAUGAAUAAGAUUGUACAACC | 278 | 2550 | 2572 |
| AD-1490426 | AUUAGAGAACAUGGUGCUUAU | 144 | AUAAGCACCAUGUUCUCUAAUGA | 279 | 2566 | 2588 |
| AD-1490438 | GGUGCUUAGGGUCUGAGACCU | 145 | AGGUCUCAGACCCUAAGCACCAU | 280 | 2578 | 2600 |
| AD-1490451 | UGAGACCUUUUGAAAGGUCUU | 146 | AAGACCUUUCAAAAGGUCUCAGA | 281 | 2591 | 2613 |
| AD-1490463 | AAAGGUCUGAGAACUCUUUAU | 147 | AUAAAGAGUUCUCAGACCUUUCA | 282 | 2603 | 2625 |
| AD-1490494 | AUCAGUAUGUAUCAUGUUAAU | 148 | AUUAACAUGAUACAUACUGAUGU | 283 | 2704 | 2726 |

TABLE 3
Modified Sense and Antisense Strand
Sequences of C9 dsRNA Agents

| | | | Anti- | | | |
|---|---|---|---|---|---|---|
| | Sense | SEQ | sense | SEQ | mRNA | SEQ |
| Duplex | Sequence | ID | Sequence | ID | Target | ID |
| Name | 5′ to 3′ | NO: | 5′ to 3′ | NO: | Sequence | NO: |
| AD- | csasagagCf | 284 | asAfsggcUf | 419 | AGCAAGAGCA | 554 |
| 1488255 | aGfCfAfugu | | gAfCfaugcU | | GCATGTCAGC | |
| | cagccuuL96 | | fgCfucuugs | | CTG | |
| | | | csu | | | |
| AD- | gsgsagcuUf | 285 | asGfsauuGf | 420 | CCGGAGCTTT | 555 |
| 1488278 | uGfCfAfguu | | cAfAfcugcA | | GCAGTTGCAA | |
| | gcaaucuL96 | | faAfgcuccs | | TCT | |
| | | | gsg | | | |
| AD- | asasucugCf | 286 | asUfsuauUf | 421 | GCAATCTGCA | 556 |
| 1488294 | aUfUfUfuag | | uCfUfaaaaU | | TTTTAGAAAT | |
| | aaauaauL96 | | fgCfagauus | | AAG | |
| | | | gsc | | | |
| AD- | asgsaaauAf | 287 | asCfsuguGf | 422 | TTAGAAATAA | 557 |
| 1488306 | aGfCfAfucc | | aGfGfaugcU | | GCATCCTCAC | |
| | ucacaguL96 | | fuAfuuucus | | AGC | |
| | | | asa | | | |
| AD- | csascaguAf | 288 | asAfsuaaCf | 423 | AGCACAGTAC | 558 |
| 1488326 | cAfCfGfacc | | uGfGfucguG | | ACGACCAGTT | |
| | aguuauuL96 | | fuAfcugugs | | ATG | |
| | | | csu | | | |
| AD- | csasgagcUf | 289 | asAfscugCf | 424 | CCCAGAGCTA | 559 |
| 1488350 | aAfCfAfgaa | | uUfUfcuguU | | ACAGAAAGCA | |
| | agcaguuL96 | | faGfcucugs | | GTG | |
| | | | gsg | | | |
| AD- | csasguggCf | 290 | asUfsgugUf | 425 | AGCAGTGGCT | 560 |
| 1488366 | uCfUfGfcau | | gAfUfgcagA | | CTGCATCACA | |
| | cacacauL96 | | fgCfcacugs | | CAT | |
| | | | csu | | | |
| AD- | asuscacaCf | 291 | asUfsucuGf | 426 | GCATCACACA | 561 |
| 1488378 | aUfAfGfacu | | cAfGfucuaU | | TAGACTGCAG | |
| | gcagaauL96 | | fgUfgugaus | | AAT | |
| | | | gsc | | | |
| AD- | gsusgaauGf | 292 | asAfsucgCf | 427 | GAGTGAATGG | 562 |
| 1488390 | gUfCfAfcaa | | aUfUfgugaC | | TCACAATGCG | |
| | ugcgauuL96 | | fcAfuucacs | | ATC | |
| | | | usc | | | |
| AD- | usgscgauCf | 293 | asUfsgucUf | 428 | AATGCGATCC | 563 |
| 1488404 | cUfUfGfucu | | gAfGfacaaG | | TTGTCTCAGA | |
| | cagacauL96 | | fgAfucgcas | | CAA | |
| | | | usu | | | |
| AD- | uscsagacAf | 294 | asUfsgaaCf | 429 | TCTCAGACAA | 564 |
| 1488417 | aAfUfGfuuu | | gAfAfacauU | | ATGTTTCGTT | |
| | cguucauL96 | | fuGfucugas | | CAA | |
| | | | gsa | | | |
| AD- | csasagaaGf | 295 | asAfsaagAf | 430 | TTCAAGAAGC | 565 |
| 1488435 | cAfUfUfgag | | cCfUfcaauG | | ATTGAGGTCT | |
| | gucuuuuL96 | | fcUfucuugs | | TTG | |
| | | | asa | | | |
| AD- | usgsgacaAf | 296 | asUfsuuuCf | 431 | TTTGGACAAT | 566 |
| 1488454 | uUfUfAfaug | | cCfAfuuaaA | | TTAATGGGAA | |
| | ggaaaauL96 | | fuUfguccas | | AAG | |
| | | | asa | | | |
| AD- | gsgsagacAf | 297 | asAfscacAf | 432 | TGGGAGACAG | 567 |
| 1488491 | gAfCfGfaca | | cUfGfucguC | | ACGACAGTGT | |
| | guguguuL96 | | fuGfucuccs | | GTG | |
| | | | csa | | | |
| AD- | csusgcggAf | 298 | asAfsuugAf | 433 | GACTGCGGAA | 568 |
| 1488544 | aAfUfGfacu | | aAfGfucauU | | ATGACTTTCA | |
| | uucaauuL96 | | fuCfcgcags | | ATG | |
| | | | usc | | | |
| AD- | csusuucaAf | 299 | asUfsgccUf | 434 | GACTTTCAAT | 569 |
| 1488556 | uGfCfAfgua | | gUfAfcugcA | | GCAGTACAGG | |
| | caggcauL96 | | fuUfgaaags | | CAG | |
| | | | usc | | | |
| AD- | gsasugcaUf | 300 | asAfsaguCf | 435 | CAGATGCATA | 570 |
| 1488576 | aAfAfGfaug | | gCfAfucuuU | | AAGATGCGAC | |
| | cgacuuuL96 | | faUfgcaucs | | TTC | |
| | | | usg | | | |
| AD- | usgsuaauGf | 301 | asCfsaguCf | 436 | GGTGTAATGG | 571 |
| 1488599 | gUfGfAfcaa | | aUfUfgucaC | | TGACAATGAC | |
| | ugacuguL96 | | fcAfuuacas | | TGC | |
| | | | csc | | | |
| AD- | gsasgacuUf | 302 | asAfsuccUf | 437 | CGGAGACTTT | 572 |
| 1488621 | uUfCfAfgau | | cAfUfcugaA | | TCAGATGAGG | |
| | gaggauuL96 | | faAfgucucs | | ATG | |
| | | | csg | | | |
| AD- | gsasggauGf | 303 | asUfscacUf | 438 | ATGAGGATGA | 573 |
| 1488635 | aUfUfGfuga | | uUfCfacaaU | | TTGTGAAAGT | |
| | aagugauL96 | | fcAfuccucs | | GAG | |
| | | | asu | | | |
| AD- | csusgcagAf | 304 | asCfsuacCf | 439 | CCCTGCAGAG | 574 |
| 1488639 | gAfCfAfgag | | aCfUfcuguC | | ACAGAGTGGT | |
| | ugguaguL96 | | fuCfugcags | | AGA | |
| | | | gsg | | | |
| AD- | gsusgguaGf | 305 | asAfsgcuCf | 440 | GAGTGGTAGA | 575 |
| 1488652 | aAfGfAfguc | | aGfAfcucuU | | AGAGTCTGAG | |
| | ugagcuuL96 | | fcUfaccacs | | CTG | |
| | | | usc | | | |
| AD- | usgsgcacGf | 306 | asAfsuagCf | 441 | GCTGGCACGA | 576 |
| 1488671 | aAfCfAfgca | | cUfGfcuguU | | ACAGCAGGCT | |
| | ggcuauuL96 | | fcGfugccas | | ATG | |
| | | | gsc | | | |
| AD- | csusauggGf | 307 | asCfsuaaAf | 442 | GGCTATGGGA | 577 |
| 1488687 | aUfCfAfaca | | aUfGfuugaU | | TCAACATTTT | |
| | uuuuaguL96 | | fcCfcauags | | AGG | |
| | | | csc | | | |
| AD- | ascsaccuUf | 308 | asAfsacuCf | 443 | GCACACCTTT | 578 |
| 1488704 | uUfGfAfcaa | | aUfUfgucaA | | TGACAATGAG | |
| | ugaguuuL96 | | faAfggugus | | TTC | |
| | | | gsc | | | |
| AD- | gsusucuaCf | 309 | asUfsacaGf | 444 | GAGTTCTACA | 579 |
| 1488721 | aAfUfGfgac | | aGfUfccauU | | ATGGACTCTG | |
| | ucuguauL96 | | fgUfagaacs | | TAA | |
| | | | usc | | | |
| AD- | usgsgaaaCf | 310 | asAfsguaUf | 445 | GATGGAAACA | 580 |
| 1488754 | aCfUfCfuga | | gUfCfagagU | | CTCTGACATA | |
| | cauacuuL96 | | fgUfuuccas | | CTA | |
| | | | usc | | | |
| AD- | gsascauaCf | 311 | asAfsaggUf | 446 | CTGACATACT | 581 |
| 1488766 | uAfCfCfgaa | | cUfUfcgguA | | ACCGAAGACC | |
| | gaccuuuL96 | | fgUfaugucs | | TTG | |
| | | | asg | | | |
| AD- | gsasacguGf | 312 | asAfsgauCf | 447 | TGGAACGTGG | 582 |
| 1488787 | gCfUfUfcuu | | aAfAfgaagC | | CTTCTTTGAT | |
| | ugaucuuL96 | | fcAfcguucs | | CTA | |
| | | | csa | | | |
| AD- | ususugauCf | 313 | asCfsuuuGf | 448 | TCTTTGATCT | 583 |
| 1488799 | uAfUfGfaaa | | gUfUfucauA | | ATGAAACCAA | |
| | ccaaaguL96 | | fgAfucaaas | | AGG | |
| | | | gsa | | | |
| AD- | asasccgaAf | 314 | asGfsuucUf | 449 | AGAACCGAAC | 584 |
| 1488833 | cAfUfUfacg | | uCfGfuaauG | | ATTACGAAGA | |
| | aagaacuL96 | | fuUfcgguus | | ACA | |
| | | | csu | | | |
| AD- | asasgaacAf | 315 | asAfsaauGf | 450 | CGAAGAACAA | 585 |
| 1488847 | aAfUfUfgaa | | cUfUfcaauU | | ATTGAAGCAT | |
| | gcauuuuL96 | | fuGfuucuus | | TTA | |
| | | | csg | | | |
| AD- | asasgcauUf | 316 | asGfsaugAf | 451 | TGAAGCATTT | 586 |
| 1488858 | uAfAfAfagu | | uAfCfuuuuA | | AAAAGTATCA | |
| | aucaucuL96 | | faAfugcuus | | TCC | |
| | | | csa | | | |
| AD- | usasucauCf | 317 | asAfsuguCf | 452 | AGTATCATCC | 587 |
| 1488871 | cAfAfGfaga | | uUfCfucuuG | | AAGAGAAGAC | |
| | agacauuL96 | | fgAfugauas | | ATC | |
| | | | csu | | | |
| AD- | gsasagacAf | 318 | asCfsauuAf | 453 | GAGAAGACAT | 588 |
| 1488882 | uCfAfAfauu | | aAfAfuuugA | | CAAATTTTAA | |
| | uuaauguL96 | | fuGfucuucs | | TGC | |
| | | | usc | | | |
| AD- | ususuaauGf | 319 | asAfsgagAf | 454 | ATTTTAATGC | 589 |
| 1488895 | cAfGfCfuau | | uAfUfagcuG | | AGCTATATCT | |
| | aucucuuL96 | | fcAfuuaaas | | CTA | |
| | | | asu | | | |
| AD- | asusaucuCf | 320 | asGfsgugUf | 455 | CTATATCTCT | 590 |
| 1488904 | uAfAfAfauu | | aAfAfuuuuA | | AAAATTTACA | |
| | uacaccuL96 | | fgAfgauaus | | CCC | |
| | | | asg | | | |
| AD- | cscsacugAf | 321 | asAfsgcuUf | 456 | ACCCACTGAA | 591 |
| 1488923 | aAfCfAfaau | | uAfUfuuguU | | ACAAATAAAG | |
| | aaagcuuL96 | | fuCfaguggs | | CTG | |
| | | | gsu | | | |
| AD- | csusgaacAf | 322 | asUfsuccUf | 457 | AGCTGAACAA | 592 |
| 1488941 | aUfGfUfugu | | cAfCfaacaU | | TGTTGTGAGG | |
| | gaggaauL96 | | fuGfuucags | | AAA | |
| | | | csu | | | |
| AD- | gsusgaggAf | 323 | asUfsgagGf | 458 | TTGTGAGGAA | 593 |
| 1488953 | aAfCfAfgcc | | aGfGfcuguU | | ACAGCCTCCT | |
| | uccucauL96 | | fuCfcucacs | | CAA | |
| | | | asa | | | |
| AD- | cscsuccuCf | 324 | asAfsuguAf | 459 | AGCCTCCTCA | 594 |
| 1488965 | aAfUfUfucu | | aAfGfaaauU | | ATTTCTTTAC | |
| | uuacauuL96 | | fgAfggaggs | | ATG | |
| | | | csu | | | |
| AD- | gscsaaggGf | 325 | asAfsaacCf | 460 | TGGCAAGGGT | 595 |
| 1488986 | uAfGfUfuuu | | gAfAfaacuA | | AGTTTTCGGT | |
| | cgguuuuL96 | | fcCfcuugcs | | TTT | |
| | | | csa | | | |
| AD- | ususcgguUf | 326 | asUfsuugGf | 461 | TTTTCGGTTT | 596 |
| 1488998 | uUfCfAfuau | | aAfUfaugaA | | TCATATTCCA | |
| | uccaaauL96 | | faAfccgaas | | AAA | |
| | | | asa | | | |
| AD- | asascuauUf | 327 | asAfsgaaUf | 462 | CCAACTATTT | 597 |
| 1489029 | uUfUfGfuca | | aUfGfacaaA | | TTGTCATATT | |
| | uauucuuL96 | | faAfuaguus | | CTT | |
| | | | gsg | | | |
| AD- | asusauucUf | 328 | asUfsuucCf | 463 | TCATATTCTT | 598 |
| 1489041 | uCfAfAfaga | | uUfCfuuugA | | CAAAGAAGGA | |
| | aggaaauL96 | | faGfaauaus | | AAA | |
| | | | gsa | | | |
| AD- | asusguuuCf | 329 | asCfscuuUf | 464 | AAATGTTTCT | 599 |
| 1489045 | uGfCfAfugu | | cAfCfaugcA | | GCATGTGAAA | |
| | gaaagguL96 | | fgAfaacaus | | GGA | |
| | | | usu | | | |
| AD- | usgsaaagGf | 330 | asCfsagaUf | 465 | TGTGAAAGGA | 600 |
| 1489058 | aGfAfAfauu | | gAfAfuuucU | | GAAATTCATC | |
| | caucuguL96 | | fcCfuuucas | | TGG | |
| | | | csa | | | |
| AD- | uscsugggAf | 331 | asUfscauUf | 466 | CATCTGGGAA | 601 |
| 1489074 | aGfAfUfuug | | aCfAfaaucU | | GATTTGTAAT | |
| | uaaugauL96 | | fuCfccagas | | GAG | |
| | | | usg | | | |
| AD- | usgsuaauGf | 332 | asCfsaucGf | 467 | TTTGTAATGA | 602 |
| 1489086 | aGfAfAfauc | | cGfAfuuucU | | GAAATCGCGA | |
| | gcgauguL96 | | fcAfuuacas | | TGT | |
| | | | asa | | | |
| AD- | uscsgcgaUf | 333 | asUfsuguGf | 468 | AATCGCGATG | 603 |
| 1489098 | gUfUfGfugc | | aGfCfacaaC | | TTGTGCTCAC | |
| | ucacaauL96 | | faUfcgcgas | | AAC | |
| | | | usu | | | |
| AD- | uscsacaaCf | 334 | asAfsuccAf | 469 | GCTCACAACA | 604 |
| 1489112 | aAfCfUfuuu | | cAfAfaaguU | | ACTTTTGTGG | |
| | guggauuL96 | | fgUfugugas | | ATG | |
| | | | gsc | | | |
| AD- | gsusggauGf | 335 | asAfsaagCf | 470 | TTGTGGATGA | 605 |
| 1489126 | aUfAfUfaaa | | uUfUfuauaU | | TATAAAAGCT | |
| | agcuuuuL96 | | fcAfuccacs | | TTG | |
| | | | asa | | | |
| AD- | asasgcuuUf | 336 | asAfsuagGf | 471 | AAAAGCTTTG | 606 |
| 1489139 | gCfCfAfacu | | uAfGfuuggC | | CCAACTACCT | |
| | accuauuL96 | | faAfagcuus | | ATG | |
| | | | usu | | | |
| AD- | usasccuaUf | 337 | asAfsuucUf | 472 | ACTACCTATG | 607 |
| 1489152 | gAfAfAfagg | | cCfCfuuuuC | | AAAAGGGAGA | |
| | gagaauuL96 | | faUfagguas | | ATA | |
| | | | gsu | | | |
| AD- | ususgccuUf | 338 | asAfsuagGf | 473 | TTTTGCCTTT | 608 |
| 1489175 | uUfUfGfgaa | | uUfUfccaaA | | TTGGAAACCT | |
| | accuauuL96 | | faAfggcaas | | ATG | |
| | | | asa | | | |
| AD- | cscsuaugGf | 339 | asAfscugUf | 474 | AACCTATGGA | 609 |
| 1489190 | aAfCfUfcac | | aGfUfgaguU | | ACTCACTACA | |
| | uacaguuL96 | | fcCfauaggs | | GTA | |
| | | | usu | | | |
| AD- | ascsuacaGf | 340 | asAfsgacCf | 475 | TCACTACAGT | 610 |
| 1489202 | uAfGfCfucu | | cAfGfagcuA | | AGCTCTGGGT | |
| | gggucuuL96 | | fcUfguagus | | CTC | |
| | | | gsa | | | |
| AD- | csusggguCf | 341 | asGfsaguCf | 476 | CTCTGGGTCT | 611 |
| 1489214 | uCfUfAfgga | | cUfCfcuagA | | CTAGGAGGAC | |
| | ggacucuL96 | | fgAfcccags | | TCT | |
| | | | asg | | | |
| AD- | csuscuauGf | 342 | asAfscauAf | 477 | GACTCTATGA | 612 |
| 1489231 | aAfCfUfaau | | uAfUfuaguU | | ACTAATATAT | |
| | auauguuL96 | | fcAfuagags | | GTT | |
| | | | usc | | | |
| AD- | usgsgauaAf | 343 | asCfsuucAf | 478 | TTTGGATAAA | 613 |
| 1489247 | aGfCfUfucc | | uGfGfaagcU | | GCTTCCATGA | |
| | augaaguL96 | | fuUfauccas | | AGC | |
| | | | asa | | | |
| AD- | asasgcggAf | 344 | asAfsguuCf | 479 | TGAAGCGGAA | 614 |
| 1489264 | aAfGfGfugu | | aAfCfaccuU | | AGGTGTTGAA | |
| | ugaacuuL96 | | fuCfcgcuus | | CTA | |
| | | | csa | | | |
| AD- | gsusugaaCf | 345 | asUfsuuaUf | 480 | GTGTTGAACT | 615 |
| 1489276 | uAfAfAfaga | | gUfCfuuuuA | | AAAAGACATA | |
| | cauaaauL96 | | fgUfucaacs | | AAG | |
| | | | asc | | | |
| AD- | usasaagaGf | 346 | asAfsuacCf | 481 | CATAAAGAGA | 616 |
| 1489292 | aUfGfCfcuu | | cAfAfggcaU | | TGCCTTGGGT | |
| | ggguauuL96 | | fcUfcuuuas | | ATC | |
| | | | usg | | | |
| AD- | usasucauCf | 347 | asAfsgagAf | 482 | GGTATCATCT | 617 |
| 1489309 | uGfGfAfugu | | uAfCfauccA | | GGATGTATCT | |
| | aucucuuL96 | | fgAfugauas | | CTG | |
| | | | csc | | | |
| AD- | usasucucUf | 348 | asUfsucaGf | 483 | TGTATCTCTG | 618 |
| 1489322 | gGfCfUfuuc | | aGfAfaagcC | | GCTTTCTCTG | |
| | ucugaauL96 | | faGfagauas | | AAA | |
| | | | csa | | | |
| AD- | uscsucugAf | 349 | asUfsccaAf | 484 | TTTCTCTGAA | 619 |
| 1489334 | aAfUfCfucu | | cAfGfagauU | | ATCTCTGTTG | |
| | guuggauL96 | | fuCfagagas | | GAG | |
| | | | asa | | | |
| AD- | gsgsagcuGf | 350 | asUfscuuUf | 485 | TTGGAGCTGA | 620 |
| 1489351 | aAfUfUfuaa | | aUfUfaaauU | | ATTTAATAAA | |
| | uaaagauL96 | | fcAfgcuccs | | GAT | |
| | | | asa | | | |
| AD- | asasgaugAf | 351 | asCfscucUf | 486 | TAAAGATGAT | 621 |
| 1489362 | uUfGfUfgua | | uUfAfcacaA | | TGTGTAAAGA | |
| | aagagguL96 | | fuCfaucuus | | GGG | |
| | | | usa | | | |
| AD- | gsgsguagAf | 352 | asUfsgauGf | 487 | GAGGGTAGAG | 622 |
| 1489369 | gCfUfGfuaa | | uUfUfacagC | | CTGTAAACAT | |
| | acaucauL96 | | fuCfuacccs | | CAC | |
| | | | usc | | | |
| AD- | ascsaucaCf | 353 | asGfsaggUf | 488 | AAACATCACC | 623 |
| 1489383 | cAfGfUfgaa | | uUfUfcacuG | | AGTGAAAACC | |
| | aaccucuL96 | | fgUfgaugus | | TCA | |
| | | | usu | | | |
| AD- | csuscauaGf | 354 | asGfsaaaCf | 489 | ACCTCATAGA | 624 |
| 1489400 | aUfGfAfugu | | aAfCfaucaU | | TGATGTTGTT | |
| | uguuucuL96 | | fcUfaugags | | TCA | |
| | | | gsu | | | |
| AD- | ususguuuCf | 355 | asAfsccuCf | 490 | TGTTGTTTCA | 625 |
| 1489413 | aCfUfCfaua | | uUfAfugagU | | CTCATAAGAG | |
| | agagguuL96 | | fgAfaacaas | | GTG | |
| | | | csa | | | |
| AD- | gsasaccaGf | 356 | asAfsaauGf | 491 | TGGAACCAGA | 626 |
| 1489434 | aAfAfAfuau | | cAfUfauuuU | | AAATATGCAT | |
| | gcauuuuL96 | | fcUfgguucs | | TTG | |
| | | | csa | | | |
| AD- | gsasacugAf | 357 | asAfsgaaGf | 492 | TTGAACTGAA | 627 |
| 1489454 | aAfGfAfaaa | | cUfUfuucuU | | AGAAAAGCTT | |
| | gcuucuuL96 | | fuCfaguucs | | CTC | |
| | | | asa | | | |
| AD- | csgsaggaAf | 358 | asAfscauCf | 493 | TCCGAGGAAC | 628 |
| 1489475 | cCfGfUfgau | | aAfUfcacgG | | CGTGATTGAT | |
| | ugauguuL96 | | fuUfccucgs | | GTG | |
| | | | gsa | | | |
| AD- | usgsauguGf | 359 | asUfsgacAf | 494 | ATTGATGTGA | 629 |
| 1489489 | aCfUfGfacu | | aAfGfucagU | | CTGACTTTGT | |
| | uugucauL96 | | fcAfcaucas | | CAA | |
| | | | asu | | | |
| AD- | csusuccaUf | 360 | asAfsggaGf | 495 | CTCTTCCATA | 630 |
| 1489518 | aAfAfUfgau | | cAfUfcauuU | | AATGATGCTC | |
| | gcuccuuL96 | | faUfggaags | | CTG | |
| | | | asg | | | |
| AD- | csusccugUf | 361 | asUfsugaCf | 496 | TGCTCCTGTT | 631 |
| 1489533 | uCfUfCfauu | | uAfAfugagA | | CTCATTAGTC | |
| | agucaauL96 | | faCfaggags | | AAA | |
| | | | csa | | | |
| AD- | csusauauAf | 362 | asUfsggaAf | 497 | TCCTATATAT | 632 |
| 1489563 | uAfAfUfcug | | cCfAfgauuA | | AATCTGGTTC | |
| | guuccauL96 | | fuAfuauags | | CAG | |
| | | | gsa | | | |
| AD- | usgsguucCf | 363 | asUfsuucAf | 498 | TCTGGTTCCA | 633 |
| 1489575 | aGfUfGfaaa | | uUfUfucacU | | GTGAAAATGA | |
| | augaaauL96 | | fgGfaaccas | | AAA | |
| | | | gsa | | | |
| AD- | ascsaccuAf | 364 | asAfsguuUf | 499 | GCACACCTAA | 634 |
| 1489599 | aAfGfAfaac | | uGfUfuucuU | | AGAAACAAAA | |
| | aaaacuuL96 | | fuAfggugus | | CTT | |
| | | | gsc | | | |
| AD- | asasaacuUf | 365 | asAfsaugGf | 500 | ACAAAACTTG | 635 |
| 1489613 | gGfAfAfaga | | cUfCfuuucC | | GAAAGAGCCA | |
| | gccauuuL96 | | faAfguuuus | | TTG | |
| | | | gsu | | | |
| AD- | gscscauuGf | 366 | asUfsugaUf | 501 | GAGCCATTGA | 636 |
| 1489627 | aAfGfAfcua | | aUfAfgucuU | | AGACTATATC | |
| | uaucaauL96 | | fcAfauggcs | | AAT | |
| | | | usc | | | |
| AD- | usgsuaagAf | 367 | asAfsuguGf | 502 | AGTGTAAGAA | 637 |
| 1489653 | aAfAfUfgcc | | uGfGfcauuU | | AATGCCACAC | |
| | acacauuL96 | | fuCfuuacas | | ATG | |
| | | | csu | | | |
| AD- | csasugccAf | 368 | asUfsguaCf | 503 | CACATGCCAA | 638 |
| 1489670 | aAfAfUfgga | | cUfCfcauuU | | AATGGAGGTA | |
| | gguacauL96 | | fuGfgcaugs | | CAG | |
| | | | usg | | | |
| AD- | gsusgauuCf | 369 | asUfsuucCf | 504 | CAGTGATTCT | 639 |
| 1489690 | uAfAfUfgga | | aUfCfcauuA | | AATGGATGGA | |
| | uggaaauL96 | | fgAfaucacs | | AAG | |
| | | | usg | | | |
| AD- | gsasuggaAf | 370 | asGfscacAf | 505 | TGGATGGAAA | 640 |
| 1489702 | aGfUfGfuuu | | cAfAfacacU | | GTGTTTGTGT | |
| | gugugcuL96 | | fuUfccaucs | | GCC | |
| | | | csa | | | |
| AD- | usgsugugCf | 371 | asUfsuugAf | 506 | TTTGTGTGCC | 641 |
| 1489715 | cUfGfCfcca | | aUfGfggcaG | | TGCCCATTCA | |
| | uucaaauL96 | | fgCfacacas | | AAT | |
| | | | asa | | | |
| AD- | csasuucaAf | 372 | asAfsauuCf | 507 | CCCATTCAAA | 642 |
| 1489727 | aUfUfUfgag | | cCfUfcaaaU | | TTTGAGGGAA | |
| | ggaauuuL96 | | fuUfgaaugs | | TTG | |
| | | | gsg | | | |
| AD- | cscsugugAf | 373 | asUfsuguUf | 508 | TGCCTGTGAA | 643 |
| 1489748 | aAfUfCfagu | | uAfCfugauU | | ATCAGTAAAC | |
| | aaacaauL96 | | fuCfacaggs | | AAA | |
| | | | csa | | | |
| AD- | asasuuucUf | 374 | asCfsuggCf | 509 | AAAATTTCTG | 644 |
| 1489752 | gAfAfGfgau | | aAfUfccuuC | | AAGGATTGCC | |
| | ugccaguL96 | | faGfaaauus | | AGC | |
| | | | usu | | | |
| AD- | asusagagCf | 375 | asAfsgagAf | 510 | AAATAGAGCT | 645 |
| 1489774 | uGfUfUfggc | | aGfCfcaacA | | GTTGGCTTCT | |
| | uucucuuL96 | | fgCfucuaus | | CTG | |
| | | | usu | | | |
| AD- | asgsuggaAf | 376 | asUfsaguGf | 511 | CCAGTGGAAG | 646 |
| 1489801 | gAfAfGfaaa | | uUfUfucuuC | | AAGAAAACAC | |
| | acacuauL96 | | fuUfccacus | | TAG | |
| | | | gsg | | | |
| AD- | asasacacUf | 377 | asAfsucuGf | 512 | GAAAACACTA | 647 |
| 1489813 | aGfUfAfccu | | aAfGfguacU | | GTACCTTCAG | |
| | ucagauuL96 | | faGfuguuus | | ATC | |
| | | | usc | | | |
| AD- | csusgaagAf | 378 | asGfscagCf | 513 | CCCTGAAGAT | 648 |
| 1489820 | uAfAfUfcuu | | uAfAfgauuA | | AATCTTAGCT | |
| | agcugcuL96 | | fuCfuucags | | GCC | |
| | | | gsg | | | |
| AD- | csusgccaAf | 379 | asUfsguuGf | 514 | AGCTGCCAAG | 649 |
| 1489836 | gUfAfAfaua | | cUfAfuuuaC | | TAAATAGCAA | |
| | gcaacauL96 | | fuUfggcags | | CAT | |
| | | | csu | | | |
| AD- | ususcaugAf | 380 | asGfsuugGf | 515 | GCTTCATGAA | 650 |
| 1489859 | aAfAfUfccu | | uAfGfgauuU | | AATCCTACCA | |
| | accaacuL96 | | fuCfaugaas | | ACC | |
| | | | gsc | | | |
| AD- | uscsugaaGf | 381 | asAfsagaGf | 516 | CCTCTGAAGT | 651 |
| 1489880 | uCfUfCfuuc | | aGfAfagagA | | CTCTTCTCTC | |
| | ucucuuuL96 | | fcUfucagas | | TTA | |
| | | | gsg | | | |
| AD- | uscsucucUf | 382 | asAfsauuAf | 517 | CTTCTCTCTT | 652 |
| 1489892 | uAfGfGfucu | | uAfGfaccuA | | AGGTCTATAA | |
| | auaauuuL96 | | faGfagagas | | TTT | |
| | | | asg | | | |
| AD- | csusuccuUf | 383 | asAfsucaCf | 518 | TTCTTCCTTA | 653 |
| 1489904 | aAfAfCfucc | | aGfGfaguuU | | AACTCCTGTG | |
| | ugugauuL96 | | faAfggaags | | ATG | |
| | | | asa | | | |
| AD- | cscsuaauGf | 384 | asAfscugUf | 519 | TCCCTAATGA | 654 |
| 1489923 | aGfAfAfguc | | uGfAfcuucU | | GAAGTCAACA | |
| | aacaguuL96 | | fcAfuuaggs | | GTG | |
| | | | gsa | | | |
| AD- | asascaguGf | 385 | asUfsucuGf | 520 | TCAACAGTGA | 655 |
| 1489937 | aAfAfUfacg | | gCfGfuauuU | | AATACGCCAG | |
| | ccagaauL96 | | fcAfcuguus | | AAC | |
| | | | gsa | | | |
| AD- | csgsccagAf | 386 | asGfsggaUf | 521 | TACGCCAGAA | 656 |
| 1489949 | aCfUfGfcuu | | aAfAfgcagU | | CTGCTTTATC | |
| | uaucccuL96 | | fuCfuggcgs | | CCA | |
| | | | usa | | | |
| AD- | ususauccCf | 387 | asUfsggcAf | 522 | CTTTATCCCA | 657 |
| 1489962 | aCfGfGfaaa | | uUfUfuccgU | | CGGAAAATGC | |
| | augccauL96 | | fgGfgauaas | | CAA | |
| | | | asg | | | |
| AD- | asasaugcCf | 388 | asUfsuuaGf | 523 | GAAAATGCCA | 658 |
| 1489974 | aAfUfCfucu | | aAfGfagauU | | ATCTCTTCTA | |
| | ucuaaauL96 | | fgGfcauuus | | AAA | |
| | | | usc | | | |
| AD- | ususcaaaGf | 389 | asCfsguuUf | 524 | ACTTCAAAGT | 659 |
| 1489988 | uAfAfUfuuu | | gAfAfaauuA | | AATTTTCAAA | |
| | caaacguL96 | | fcUfuugaas | | CGG | |
| | | | gsu | | | |
| AD- | ususguauGf | 390 | asAfsgaaUf | 525 | CTTTGTATGG | 660 |
| 1490011 | gUfUfAfaca | | aUfGfuuaaC | | TTAACATATT | |
| | uauucuuL96 | | fcAfuacaas | | CTG | |
| | | | asg | | | |
| AD- | usgsccagGf | 391 | asGfsuguGf | 526 | TCTGCCAGGT | 661 |
| 1490030 | uCfCfAfuga | | gUfCfauggA | | CCATGACCAC | |
| | ccacacuL96 | | fcCfuggcas | | ACG | |
| | | | gsa | | | |
| AD- | ascscacaCf | 392 | asGfscauGf | 527 | TGACCACACG | 662 |
| 1490043 | gUfCfUfgua | | gUfAfcagaC | | TCTGTACCAT | |
| | ccaugcuL96 | | fgUfguggus | | GCA | |
| | | | csa | | | |
| AD- | cscsaugcAf | 393 | asAfsuaaGf | 528 | TACCATGCAA | 663 |
| 1490057 | aUfUfUfaac | | aGfUfuaaaU | | TTTAACTCTT | |
| | ucuuauuL96 | | fuGfcauggs | | ATT | |
| | | | usa | | | |
| AD- | ususgguuAf | 394 | asAfscacCf | 529 | GTTTGGTTAT | 664 |
| 1490077 | uUfUfGfcuu | | uAfAfgcaaA | | TTGCTTAGGT | |
| | agguguuL96 | | fuAfaccaas | | GTG | |
| | | | asc | | | |
| AD- | csasuacaUf | 395 | asAfsuuuGf | 530 | TGCATACATT | 665 |
| 1490098 | uCfAfUfuca | | cUfGfaaugA | | CATTCAGCAA | |
| | gcaaauuL96 | | faUfguaugs | | ATG | |
| | | | csa | | | |
| AD- | csasgccaCf | 396 | asAfsacuGf | 531 | ACCAGCCACG | 666 |
| 1490127 | gUfGfCfaca | | cUfGfugcaC | | TGCACAGCAG | |
| | gcaguuuL96 | | fgUfggcugs | | TTG | |
| | | | gsu | | | |
| AD- | csasguugCf | 397 | asAfsagaCf | 532 | AGCAGTTGCT | 667 |
| 1490142 | uUfUfUfacu | | uAfGfuaaaA | | TTTACTAGTC | |
| | agucuuuL96 | | fgCfaacugs | | TTA | |
| | | | csu | | | |
| AD- | csusagucUf | 398 | asAfsaucGf | 533 | TACTAGTCTT | 668 |
| 1490154 | uAfGfCfucu | | uAfGfagcuA | | AGCTCTACGA | |
| | acgauuuL96 | | faGfacuags | | TTT | |
| | | | usa | | | |
| AD- | ascsgauuUf | 399 | asGfsacaCf | 534 | CTACGATTTA | 669 |
| 1490168 | aAfAfUfcca | | aUfGfgauuU | | AATCCATGTG | |
| | ugugucuL96 | | faAfaucgus | | TCC | |
| | | | asg | | | |
| AD- | ascsuacuAf | 400 | asUfsccuCf | 535 | AAACTACTAG | 670 |
| 1490193 | gUfUfUfacc | | uGfGfuaaaC | | TTTACCAGAG | |
| | agaggauL96 | | fuAfguagus | | GAC | |
| | | | usu | | | |
| AD- | asasgggaGf | 401 | asAfsacuCf | 536 | TGAAGGGAGA | 671 |
| 1490214 | aUfAfAfaga | | cUfCfuuuaU | | TAAAGAGGAG | |
| | ggaguuuL96 | | fcUfcccuus | | TTG | |
| | | | csa | | | |
| AD- | gsasguugGf | 402 | asUfsuguAf | 537 | AGGAGTTGGT | 672 |
| 1490229 | uUfAfAfugg | | cCfCfauuaA | | TAATGGGTAC | |
| | guacaauL96 | | fcCfaacucs | | AAA | |
| | | | csu | | | |
| AD- | asusccagUf | 403 | asUfsuccUf | 538 | AAATCCAGTT | 673 |
| 1490251 | uAfGfAfuga | | uUfCfaucuA | | AGATGAAAGG | |
| | aaggaauL96 | | faCfuggaus | | AAT | |
| | | | usu | | | |
| AD- | asasggaaUf | 404 | asCfsacuAf | 539 | GAAAGGAATA | 674 |
| 1490264 | aAfUfAfuag | | uCfUfauauU | | ATATAGATAG | |
| | auaguguL96 | | faUfuccuus | | TGT | |
| | | | usc | | | |
| AD- | gsasuaguGf | 405 | asUfsucuGf | 540 | TAGATAGTGT | 675 |
| 1490276 | uUfCfAfgua | | cUfAfcugaA | | TCAGTAGCAG | |
| | gcagaauL96 | | fcAfcuaucs | | AAT | |
| | | | usa | | | |
| AD- | gsasauagAf | 406 | asAfsguuUf | 541 | CAGAATAGAA | 676 |
| 1490293 | aUfGfAfaca | | aUfGfuucaU | | TGAACATAAA | |
| | uaaacuuL96 | | fuCfuauucs | | CTA | |
| | | | usg | | | |
| AD- | asasuuccUf | 407 | asAfsugaUf | 542 | GAAATTCCTT | 677 |
| 1490314 | uCfUfAfuuu | | cAfAfauagA | | CTATTTGATC | |
| | gaucauuL96 | | faGfgaauus | | ATA | |
| | | | usc | | | |
| AD- | usasguccAf | 408 | asCfsuagGf | 543 | TATAGTCCAA | 678 |
| 1490336 | aCfUfUfaau | | uAfUfuaagU | | CTTAATACCT | |
| | accuaguL96 | | fuGfgacuas | | AGC | |
| | | | usa | | | |
| AD- | csusagccUf | 409 | asUfsauaCf | 544 | ACCTAGCCTT | 679 |
| 1490352 | uAfUfGfagu | | aAfCfucauA | | ATGAGTTGTA | |
| | uguauauL96 | | faGfgcuags | | TAA | |
| | | | gsu | | | |
| AD- | usasuaagGf | 410 | asGfsuagGf | 545 | TGTATAAGGT | 680 |
| 1490368 | uAfAfGfguu | | uAfAfccuuA | | AAGGTTACCT | |
| | accuacuL96 | | fcCfuuauas | | ACC | |
| | | | csa | | | |
| AD- | usasccuaCf | 411 | asAfsucaGf | 546 | GTTACCTACC | 681 |
| 1490381 | cUfGfAfgaa | | cUfUfcucaG | | TGAGAAGCTG | |
| | gcugauuL96 | | fgUfagguas | | ATT | |
| | | | asc | | | |
| AD- | asgscugaUf | 412 | asAfscaaCf | 547 | GAAGCTGATT | 682 |
| 1490394 | uAfAfCfauu | | cAfAfuguuA | | AACATTGGTT | |
| | gguuguuL96 | | faUfcagcus | | GTA | |
| | | | usc | | | |
| AD- | ususguacAf | 413 | asUfsaauGf | 548 | GGTTGTACAA | 683 |
| 1490410 | aUfCfUfuau | | aAfUfaagaU | | TCTTATTCAT | |
| | ucauuauL96 | | fuGfuacaas | | TAG | |
| | | | csc | | | |
| AD- | asusuagaGf | 414 | asUfsaagCf | 549 | TCATTAGAGA | 684 |
| 1490426 | aAfCfAfugg | | aCfCfauguU | | ACATGGTGCT | |
| | ugcuuauL96 | | fcUfcuaaus | | TAG | |
| | | | gsa | | | |
| AD- | gsgsugcuUf | 415 | asGfsgucUf | 550 | ATGGTGCTTA | 685 |
| 1490438 | aGfGfGfucu | | cAfGfacccU | | GGGTCTGAGA | |
| | gagaccuL96 | | faAfgcaccs | | CCT | |
| | | | asu | | | |
| AD- | usgsagacCf | 416 | asAfsgacCf | 551 | TCTGAGACCT | 686 |
| 1490451 | uUfUfUfgaa | | uUfUfcaaaA | | TTTGAAAGGT | |
| | aggucuuL96 | | fgGfucucas | | CTG | |
| | | | gsa | | | |
| AD- | asasagguCf | 417 | asUfsaaaGf | 552 | TGAAAGGTCT | 687 |
| 1490463 | uGfAfGfaac | | aGfUfucucA | | GAGAACTCTT | |
| | ucuuuauL96 | | fgAfccuuus | | TAA | |
| | | | csa | | | |
| AD- | asuscaguAf | 418 | asUfsuaaCf | 553 | ACATCAGTAT | 13 |
| 1490494 | uGfUfAfuca | | aUfGfauacA | | GTATCATGTT | |
| | uguuaauL96 | | fuAfcugaus | | AAC | |
| | | | gsu | | | |

TABLE 4
Single Dose Screen in Hepa1-6 Cells

| | RLuc/FLuc | |
|---|---|---|
| | 10 nM | |
| Duplex Name | Avg (%) | SD (%) |
| AD-1490494.1 | 48.654 | 2.065 |
| AD-1490463.1 | 40.103 | 2.879 |
| AD-1490451.1 | 104.095 | 8.795 |
| AD-1490438.1 | 61.403 | 5.678 |
| AD-1490426.1 | 44.382 | 2.840 |
| AD-1490410.1 | 41.419 | 3.180 |
| AD-1490394.1 | 45.759 | 2.173 |
| AD-1490381.1 | 47.409 | 2.698 |
| AD-1490368.1 | 43.806 | 5.123 |
| AD-1490352.1 | 56.171 | 6.466 |
| AD-1490336.1 | 51.863 | 3.248 |
| AD-1490314.1 | 36.093 | 1.778 |
| AD-1490293.1 | 43.204 | 2.092 |
| AD-1490276.1 | 56.555 | 0.798 |
| AD-1490264.1 | 54.941 | 7.010 |
| AD-1490251.1 | 44.403 | 4.830 |
| AD-1490229.1 | 38.869 | 3.572 |
| AD-1490214.1 | 56.443 | 4.469 |
| AD-1490193.1 | 59.634 | 3.263 |
| AD-1490168.1 | 47.345 | 8.776 |
| AD-1490154.1 | 44.533 | 5.592 |
| AD-1490142.1 | 58.531 | 3.736 |
| AD-1490127.1 | 59.177 | 7.407 |
| AD-1490098.1 | 59.720 | 5.050 |
| AD-1490077.1 | 45.878 | 2.381 |
| AD-1490057.1 | 48.783 | 2.253 |
| AD-1490043.1 | 71.033 | 2.365 |
| AD-1490030.1 | 68.766 | 2.172 |
| AD-1490011.1 | 45.717 | 6.379 |
| AD-1489988.1 | 43.465 | 3.507 |
| AD-1489974.1 | 39.490 | 2.602 |
| AD-1489962.1 | 48.111 | 3.340 |
| AD-1489949.1 | 45.288 | 5.749 |
| AD-1489937.1 | 58.246 | 2.227 |
| AD-1489923.1 | 47.706 | 3.500 |
| AD-1489904.1 | 41.828 | 4.215 |
| AD-1489892.1 | 44.581 | 4.215 |
| AD-1489880.1 | 41.615 | 4.705 |
| AD-1489859.1 | 39.015 | 5.805 |
| AD-1489836.1 | 46.220 | 2.523 |
| AD-1489820.1 | 50.937 | 2.935 |
| AD-1489813.1 | 44.294 | 3.785 |
| AD-1489801.1 | 56.015 | 3.769 |
| AD-1489774.1 | 42.976 | 4.032 |
| AD-1489752.1 | 56.156 | 7.364 |
| AD-1489748.1 | 38.261 | 4.124 |
| AD-1489727.1 | 45.410 | 3.490 |
| AD-1489715.1 | 65.568 | 8.251 |
| AD-1489702.1 | 52.411 | 5.188 |
| AD-1489690.1 | 34.807 | 1.004 |
| AD-1489670.1 | 50.671 | 4.178 |
| AD-1489653.1 | 32.212 | 4.123 |
| AD-1489627.1 | 39.296 | 1.205 |
| AD-1489613.1 | 45.137 | 1.022 |
| AD-1489599.1 | 48.692 | 4.691 |
| AD-1489575.1 | 39.052 | 2.384 |
| AD-1489563.1 | 37.313 | 4.112 |
| AD-1489533.1 | 39.972 | 2.975 |
| AD-1489518.1 | 40.662 | 2.767 |
| AD-1489489.1 | 35.030 | 1.833 |
| AD-1489475.1 | 64.864 | 5.183 |
| AD-1489454.1 | 36.728 | 2.127 |
| AD-1489434.1 | 41.526 | 5.090 |
| AD-1489413.1 | 52.585 | 4.985 |
| AD-1489400.1 | 46.719 | 2.269 |
| AD-1489383.1 | 50.275 | 2.471 |
| AD-1489369.1 | 42.952 | 2.031 |
| AD-1489362.1 | 45.370 | 2.827 |
| AD-1489351.1 | 36.509 | 2.872 |
| AD-1489334.1 | 41.497 | 3.170 |
| AD-1489322.1 | 40.441 | 0.761 |
| AD-1489309.1 | 33.937 | 3.145 |
| AD-1489292.1 | 45.730 | 3.250 |
| AD-1489276.1 | 36.116 | 6.353 |
| AD-1489264.1 | 33.924 | 1.477 |
| AD-1489247.1 | 39.276 | 3.104 |
| AD-1489231.1 | 40.129 | 2.027 |
| AD-1489214.1 | 48.017 | 6.669 |
| AD-1489202.1 | 53.948 | 1.533 |
| AD-1489190.1 | 40.481 | 2.082 |
| AD-1489175.1 | 42.134 | 2.048 |
| AD-1489152.1 | 39.116 | 4.182 |
| AD-1489139.1 | 39.525 | 3.712 |
| AD-1489126.1 | 37.278 | 4.751 |
| AD-1489112.1 | 44.289 | 4.290 |
| AD-1489098.1 | 38.100 | 1.085 |
| AD-1489086.1 | 33.271 | 2.159 |
| AD-1489074.1 | 33.305 | 3.763 |
| AD-1489058.1 | 36.115 | 2.050 |
| AD-1489045.1 | 40.079 | 6.058 |
| AD-1489041.1 | 39.604 | 5.683 |
| AD-1489029.1 | 45.585 | 6.121 |
| AD-1488998.1 | 27.309 | 2.170 |
| AD-1488986.1 | 34.807 | 1.231 |
| AD-1488965.1 | 40.741 | 2.519 |
| AD-1488953.1 | 79.292 | 4.904 |
| AD-1488941.1 | 24.731 | 0.439 |
| AD-1488923.1 | 16.648 | 1.170 |
| AD-1488904.1 | 14.349 | 1.070 |
| AD-1488895.1 | 9.062 | 0.591 |
| AD-1488882.1 | 15.683 | 1.553 |
| AD-1488871.1 | 43.399 | 2.097 |
| AD-1488858.1 | 90.899 | 2.166 |
| AD-1488847.1 | 11.322 | 0.958 |
| AD-1488833.1 | 16.833 | 1.359 |
| AD-1488799.1 | 23.694 | 2.446 |
| AD-1488787.1 | 15.483 | 0.753 |
| AD-1488766.1 | 17.838 | 1.728 |
| AD-1488754.1 | 22.173 | 1.689 |
| AD-1488721.1 | 34.568 | 2.537 |
| AD-1488704.1 | 23.191 | 1.585 |
| AD-1488687.1 | 53.304 | 1.070 |
| AD-1488671.1 | 36.204 | 1.312 |
| AD-1488652.1 | 34.787 | 2.680 |
| AD-1488639.1 | 46.302 | 2.837 |
| AD-1488635.1 | 12.560 | 0.349 |
| AD-1488621.1 | 16.477 | 0.628 |
| AD-1488599.1 | 22.377 | 1.958 |
| AD-1488576.1 | 13.385 | 1.109 |
| AD-1488556.1 | 26.110 | 3.016 |
| AD-1488544.1 | 17.901 | 0.238 |
| AD-1488491.1 | 69.787 | 1.290 |
| AD-1488454.1 | 13.613 | 1.443 |
| AD-1488435.1 | 41.181 | 1.990 |
| AD-1488417.1 | 14.937 | 0.749 |
| AD-1488404.1 | 25.564 | 1.165 |
| AD-1488390.1 | 16.143 | 1.126 |
| esAD-1488378.1 | 33.185 | 2.449 |
| AD-1488366.1 | 47.450 | 5.441 |
| AD-1488350.1 | 47.646 | 2.059 |
| AD-1488326.1 | 33.503 | 2.968 |
| AD-1488306.1 | 24.030 | 2.175 |
| AD-1488294.1 | 17.089 | 0.731 |
| AD-1488278.1 | 41.393 | 3.556 |
| AD-1488255.1 | 33.474 | 3.827 |

The application's sequence listing, which the Patent Office published only in electronic form, follows.

SEQUENCE LISTING (687 sequences)

SEQ ID NO: 1 - DNA, 2770 bp, Homo sapiens
  source 1..2770: mol_type = genomic DNA
accccactcgcagccacccagcaagagcagcatgtcagcctgccggagctttgcagttgcaatctgcattttagaaataagcatcctcacagcacagtacacgaccagttatgacccagagctaacagaaagcagtggctctgcatcacacatagactgcagaatgagcccctggagtgaatggtcacaatgcgatccttgtctcagacaaatgtttcgttcaagaagcattgaggtctttggacaatttaatgggaaaagatgcaccgacgctgtgggagacagacgacagtgtgtgcccacagagccctgtgaggatgctgaggatgactgcggaaatgactttcaatgcagtacaggcagatgcataaagatgcgacttcggtgtaatggtgacaatgactgcggagacttttcagatgaggatgattgtgaaagtgagccccgtcccccctgcagagacagagtggtagaagagtctgagctggcacgaacagcaggctatgggatcaacattttagggatggatcccctaagcacaccttttgacaatgagttctacaatggactctgtaaccgggatcgggatggaaacactctgacatactaccgaagaccttggaacgtggcttctttgatctatgaaaccaaaggcgagaaaaatttcagaaccgaacattacgaagaacaaattgaagcatttaaaagtatcatccaagagaagacatcaaattttaatgcagctatatctctaaaatttacacccactgaaacaaataaagctgaacaatgttgtgaggaaacagcctcctcaatttctttacatggcaagggtagttttcggttttcatattccaaaaatgaaacttaccaactatttttgtcatattcttcaaagaaggaaaaaatgtttctgcatgtgaaaggagaaattcatctgggaagatttgtaatgagaaatcgcgatgttgtgctcacaacaacttttgtggatgatataaaagctttgccaactacctatgaaaagggagaatattttgcctttttggaaacctatggaactcactacagtagctctgggtctctaggaggactctatgaactaatatatgttttggataaagcttccatgaagcggaaaggtgttgaactaaaagacataaagagatgccttgggtatcatctggatgtatctctggctttctctgaaatctctgttggagctgaatttaataaagatgattgtgtaaagaggggagagggtagagctgtaaacatcaccagtgaaaacctcatagatgatgttgtttcactcataagaggtggaaccagaaaatatgcatttgaactgaaagaaaagcttctccgaggaaccgtgattgatgtgactgactttgtcaactgggcctcttccataaatgatgctcctgttctcattagtcaaaaactgtctcctatatataatctggttccagtgaaaatgaaaaatgcacacctaaagaaacaaaacttggaaagagccattgaagactatatcaatgaatttagtgtaagaaaatgccacacatgccaaaatggaggtacagtgattctaatggatggaaagtgtttgtgtgcctgcccattcaaatttgagggaattgcctgtgaaatcagtaaacaaaaaatttctgaaggattgccagccctagagttccccaatgaaaaatagagctgttggcttctctgagctccagtggaagaagaaaacactagtaccttcagatcctacccctgaagataatcttagctgccaagtaaatagcaacatgcttcatgaaaatcctaccaacctctgaagtctcttctctcttaggtctataatttttttttaaatttttcttccttaaactcctgtgatgtttccattttttgttccctaatgagaagtcaacagtgaaatacgccagaactgctttatcccacggaaaatgccaatctcttctaaaaaaaaacaaaattaaattaaaaacagaatgttggtttaaaaaacttcaaagtaattttcaaacggctttgtatggttaacatattctgccaggtccatgaccacacgtctgtaccatgcaatttaactcttatttacattgttatgtttagtttggttatttgcttaggtgtgcatacattcattcagcaaatgctgagcaccagccacgtgcacagcagttgcttttactagtcttagctctacgatttaaatccatgtgtccaagggggaaaacatattatatttgtaaccaaaaactactagtttaccagaggactgaagggagataaagaggagttggttaatgggtacaaaaatccagttagatgaaaggaataatatagatagtgttcagtagcagaatagaatgaacataaactattagtttaaattatgtgaaattccttctatttgatcatattttacaagaaaaaacatcaattttatatagtccaacttaatacctagccttatgagttgtataaggtaaggttacctacctgagaagctgattaacattggttgtacaatcttattcattagagaacatggtgcttagggtctgagaccttttgaaaggtctgagaactctttaaaaaaaggaaagaaagaaagaaaagaggaaaaatatatcaaaataaaaaaatgcaaaatgagaattaataaatgcttaaacatcagtatgtatcatgttaactttattgttactattaataaacatttcacacatttataaataaa

SEQ ID NO: 2 - DNA, 2770 bp, Homo sapiens
  source 1..2770: mol_type = genomic DNA
tttatttataaatgtgtgaaatgtttattaatagtaacaataaagttaacatgatacatactgatgtttaagcatttattaattctcattttgcatttttttattttgatatatttttcctcttttctttctttctttcctttttttaaagagttctcagacctttcaaaaggtctcagaccctaagcaccatgttctctaatgaataagattgtacaaccaatgttaatcagcttctcaggtaggtaaccttaccttatacaactcataaggctaggtattaagttggactatataaaattgatgttttttcttgtaaaatatgatcaaatagaaggaatttcacataatttaaactaatagtttatgttcattctattctgctactgaacactatctatattattcctttcatctaactggatttttgtacccattaaccaactcctctttatctcccttcagtcctctggtaaactagtagtttttggttacaaatataatatgttttcccccttggacacatggatttaaatcgtagagctaagactagtaaaagcaactgctgtgcacgtggctggtgctcagcatttgctgaatgaatgtatgcacacctaagcaaataaccaaactaaacataacaatgtaaataagagttaaattgcatggtacagacgtgtggtcatggacctggcagaatatgttaaccatacaaagccgtttgaaaattactttgaagttttttaaaccaacattctgtttttaatttaattttgtttttttttagaagagattggcattttccgtgggataaagcagttctggcgtatttcactgttgacttctcattagggaacaaaaaatggaaacatcacaggagtttaaggaagaaaaatttaaaaaaaaattatagacctaagagagaagagacttcagaggttggtaggattttcatgaagcatgttgctatttacttggcagctaagattatcttcaggggtaggatctgaaggtactagtgttttcttcttccactggagctcagagaagccaacagctctatttttcattggggaactctagggctggcaatccttcagaaattttttgtttactgatttcacaggcaattccctcaaatttgaatgggcaggcacacaaacactttccatccattagaatcactgtacctccattttggcatgtgtggcattttcttacactaaattcattgatatagtcttcaatggctctttccaagttttgtttctttaggtgtgcatttttcattttcactggaaccagattatatataggagacagtttttgactaatgagaacaggagcatcatttatggaagaggcccagttgacaaagtcagtcacatcaatcacggttcctcggagaagcttttctttcagttcaaatgcatattttctggttccacctcttatgagtgaaacaacatcatctatgaggttttcactggtgatgtttacagctctaccctctcccctctttacacaatcatctttattaaattcagctccaacagagatttcagagaaagccagagatacatccagatgatacccaaggcatctctttatgtcttttagttcaacacctttccgcttcatggaagctttatccaaaacatatattagttcatagagtcctcctagagacccagagctactgtagtgagttccataggtttccaaaaaggcaaaatattctcccttttcataggtagttggcaaagcttttatatcatccacaaaagttgttgtgagcacaacatcgcgatttctcattacaaatcttcccagatgaatttctcctttcacatgcagaaacattttttccttctttgaagaatatgacaaaaatagttggtaagtttcatttttggaatatgaaaaccgaaaactacccttgccatgtaaagaaattgaggaggctgtttcctcacaacattgttcagctttatttgtttcagtgggtgtaaattttagagatatagctgcattaaaatttgatgtcttctcttggatgatacttttaaatgcttcaatttgttcttcgtaatgttcggttctgaaatttttctcgcctttggtttcatagatcaaagaagccacgttccaaggtcttcggtagtatgtcagagtgtttccatcccgatcccggttacagagtccattgtagaactcattgtcaaaaggtgtgcttaggggatccatccctaaaatgttgatcccatagcctgctgttcgtgccagctcagactcttctaccactctgtctctgcaggggggacggggctcactttcacaatcatcctcatctgaaaagtctccgcagtcattgtcaccattacaccgaagtcgcatctttatgcatctgcctgtactgcattgaaagtcatttccgcagtcatcctcagcatcctcacagggctctgtgggcacacactgtcgtctgtctcccacagcgtcggtgcatcttttcccattaaattgtccaaagacctcaatgcttcttgaacgaaacatttgtctgagacaaggatcgcattgtgaccattcactccaggggctcattctgcagtctatgtgtgatgcagagccactgctttctgttagctctgggtcataactggtcgtgtactgtgctgtgaggatgcttatttctaaaatgcagattgcaactgcaaagctccggcaggctgacatgctgctcttgctgggtggctgcgagtggggt

SEQ ID NO: 3 - DNA, 2263 bp, Mus musculus
  source 1..2263: mol_type = genomic DNA
ctccggctgcaaaggaatgctttgcaagcctccagggctccccaggaggagcagcatggcctcaggcatggccatcaccttagcccttgccatctttgccttgggtgtcaatgcacagatgccaatacccgtttccagagccagaagtaatggatggagtctctttttaggctttgggtttctcctgcctcttttttctttattcatcgctgaacaactctccttctgagatcccatggctctagaatgattctactaaaaagcaaagaattgtgtctgcaaaagtctcctctgctggagaagaacaagaacaacactatcccataccgatagactgcagaatgagcccatggagcaattggtcagagtgtgatccttgcctcaaacaaaggtttcgctcaagaagcattttagccttcggacagtttaatgggaaaagctgtgttgatgttttgggagacagacaaggctgtgaacccacccaggagtgtgaagagatacaggaaaactgtggaaatgactttcagtgtgagacaggcaggtgcataaagaggagacttctgtgtaatggtgacaacgactgtggagattattctgatgagaatgactgtgacgatgacccacgcaccccatgccgtgaccgagtagcggaagaatcagagctgggactaacagcaggctatgggatcaacatcttagggatggagcccctgagaacaccttttgacaatgagttctacaacggactctgtgaccgggtacgagacgaaaagacatactatcgcaaaccttggaatgtagtttctctgatctatgaaaccaaggctgataaaagtttcagaactgagaactatgacgaacacttggaagtattcaaagccatcaaccgagagaagacctcgaattttaatgcagattttgccctaaaattttcagccaccgaagtacctgaaaagggagctggggaagtctccccagcagaacactcttcaaaacctacaaacatttcagctaaatttaaattttcatatttcatgggaaaaaattttcgaagactatcatcttatttttcgcagtcgaaaaagatgtttgtgcacttgagaggagtggtccaactggggagatttgtaatgaggaatcgggatgttgtgctgaggtcaactttcctggatgatgtaaaagctctaccaacttcctatgaaaagggagaatattttggatttttggaaacctatgggactcactacagtacctctgggtccctgggaggacaatatgaaattgtctatgtcttggataaagcttccatgaaagagaaaggtgttgacctgaatgatgtaaaacattgtcttggatttaatatggatttacgtattcctctacaagacgacttaaaggatgcatcagtcacagcaagtgttaatgcggatggttgcataaagacagataatgggaaaactgtaaacatcacccgcgataacatcatagatgatgtcatttcattcataagaggagggactagggagcaagcaattctcctgaaagagaagattctcagaggagacaagacatttgataagactgacttcgccaactgggcctcgtccctggcaaacgctccagctctcatcagtcaaagaatgtcccctatatataatctcattcctttgaaaataaaagatgcatacataaagaagcaaaatttggaaaaggctgttgaagactatatagatgaattcagtactaaaaggtgctacccatgtctaaatggaggtactataattcttctggatgggcagtgcctgtgctcctgcccaatgatgtttaggggaatggcctgcgaaatccatcaaaaaatatagccttcaggaaacaaagcaaaccctggttcacatggaagggggaaaaaaaaaggacaaaaaaaaaaaatcccaggactttccaacttagcatcttaccctggagctaatccgcactgccaagtggaaagcagcttgtttcatggaaatcctaccaacctctgatgctgtctgttttaatctacagtgcctttctcccctctttaatgcctataatgcttccattttttcattccctaatgaagagtcagcagtgagatatgcccgggctgccttttcccacaggcaatgccaatctcccgctaataaaacaaaattaaattaaaaacagaatgttgtgctaaaaggcttcaagtcaccgccaagctgcattgtaggattaatatattccacccgtcccatta

SEQ ID NO: 4 - DNA, 2262 bp, Mus musculus
  source 1..2262: mol_type = genomic DNA
aatgggacgggtggaatatattaatcctacaatgcagcttggcggtgacttgaagccttttagcacaacattctgtttttaatttaattttgttttattagcgggagattggcattgcctgtgggaaaaggcagcccgggcatatctcactgctgactcttcattagggaatgaaaaaatggaagcattataggcattaaagaggggagaaaggcactgtagattaaaacagacagcatcagaggttggtaggatttccatgaaacaagctgctttccacttggcagtgcggattagctccagggtaagatgctaagttggaaagtcctgggattttttttttttgtcctttttttttcccccttccatgtgaaccagggtttgctttgtttcctgaaggctatattttttgatggatttcgcaggccattcccctaaacatcattgggcaggagcacaggcactgcccatccagaagaattatagtacctccatttagacatgggtagcaccttttagtactgaattcatctatatagtcttcaacagccttttccaaattttgcttctttatgtatgcatcttttattttcaaaggaatgagattatatataggggacattctttgactgatgagagctggagcgtttgccagggacgaggcccagttggcgaagtcagtcttatcaaatgtcttgtctcctctgagaatcttctctttcaggagaattgcttgctccctagtccctcctcttatgaatgaaatgacatcatctatgatgttatcgcgggtgatgtttacagttttcccattatctgtctttatgcaaccatccgcattaacacttgctgtgactgatgcatcctttaagtcgtcttgtagaggaatacgtaaatccatattaaatccaagacaatgttttacatcattcaggtcaacacctttctctttcatggaagctttatccaagacatagacaatttcatattgtcctcccagggacccagaggtactgtagtgagtcccataggtttccaaaaatccaaaatattctcccttttcataggaagttggtagagcttttacatcatccaggaaagttgacctcagcacaacatcccgattcctcattacaaatctccccagttggaccactcctctcaagtgcacaaacatctttttcgactgcgaaaaataagatgatagtcttcgaaaattttttcccatgaaatatgaaaatttaaatttagctgaaatgtttgtaggttttgaagagtgttctgctggggagacttccccagctcccttttcaggtacttcggtggctgaaaattttagggcaaaatctgcattaaaattcgaggtcttctctcggttgatggctttgaatacttccaagtgttcgtcatagttctcagttctgaaacttttatcagccttggtttcatagatcagagaaactacattccaaggtttgcgatagtatgtcttttcgtctcgtacccggtcacagagtccgttgtagaactcattgtcaaaaggtgttctcaggggctccatccctaagatgttgatcccatagcctgctgttagtcccagctctgattcttccgctactcggtcacggcatggggtgcgtgggtcatcgtcacagtcattctcatcagaataatctccacagtcgttgtcaccattacacagaagtctcctctttatgcacctgcctgtctcacactgaaagtcatttccacagttttcctgtatctcttcacactcctgggtgggttcacagccttgtctgtctcccaaaacatcaacacagcttttcccattaaactgtccgaaggctaaaatgcttcttgagcgaaacctttgtttgaggcaaggatcacactctgaccaattgctccatgggctcattctgcagtctatcggtatgggatagtgttgttcttgttcttctccagcagaggagacttttgcagacacaattctttgctttttagtagaatcattctagagccatgggatctcagaaggagagttgttcagcgatgaataaagaaaaaagaggcaggagaaacccaaagcctaaaaagagactccatccattacttctggctctggaaacgggtattggcatctgtgcattgacacccaaggcaaagatggcaagggctaaggtgatggccatgcctgaggccatgctgctcctcctggggagccctggaggcttgcaaagcattcctttgcagccggag

SEQ ID NO: 5 - DNA, 2094 bp, Rattus norvegicus
  source 1..2094: mol_type = genomic DNA
ggttgcaaagaaatgcttctcaggactccagggctgcctaggaggagcggcatggcctcaggcgtgaccatcaccctagccattgcaatctttgccttggagatcaatgcacaggccccagagcccactccccgggaagagccatcagcagacgccctcctaccaatagactgcagaatgagcacatggagtcagtggtcacagtgtgatccttgcctcaaacaaaggtttcgctcaagaagcattgaagtctttggacagtttcaggggaaaagctgtgctgatgctttgggagacagacaacattgtgaacccactcaggagtgtgaagaggtacaggaaaactgtgggaatgactttcagtgtgaaacaggcaggtgcataaagaggaaacttctgtgtaatggtgacaacgactgtggagatttttctgatgagagtgactgtgaaagtgacccacgcctcccgtgccgtgaccgagtggtagaagaatcagaactgggacgaacagcaggctatgggatcaacatcttagggatggatcccctgggcacgccttttgacaatgagttctacaatggactctgtgaccgggtacgggacggaaacactttgacatactatcgcaaaccttggaacgtagcatttctggcctatgaaaccaaggctgacaaaaatttcagaactgagaattatgaagaacagtttgaaatgttcaaaaccatcgtccgagacaggaccacgagttttaatgcaaatttagctctaaaattcacaatcactgaagcacctataaaaaaagttggagttgatgaagtcagcccagaaaaaaactcttcaaagcctaaagactcttctgttgattttcaattttcatatttcaagaaagaaaattttcaacgattgtcatcctacttgtcacagacgaaaaagatgtttctgcacgtgagaggaatgattcaactggggagatttgtcatgaggaatcggggcgttatgctgacgacaactttcctggatgatgtaaaggctttaccagtttcctatgaaaagggagaatattttggatttttggaaacctatgggactcactacagtagctctgggtccctgggagggctctacgaactgatctatgtcttggataaagcttccatgaaagagaaaggtgttgaactgagcgatgtaaagcggtgtcttgggtttaacctggatgtttctctatatacgcctctacaaaccaccttagaaggaccatcattgacagccaatgttaatcacagtgattgcttaaagacaggggatggtaaagtagtaaacatcagccgcgatcacatcatagatgatgttatttcattcataagaggagggaccaggaagcaagcagttctcctgaaagagaagcttctcagaggagccaagacgattgatgtgaatgacttcatcaactgggcctcatccttggatgacgctccagctctcattagtcaaaaactgtcccctatctataatctcattcctttgacaatgaaagatgcatacgcaaagaaacagaatatggaaaaggctattgaagactatgtgaatgaattcagtgctagaaagtgctacccatgtcaaaacggaggcacagcaattcttctggatggacagtgcatgtgctcctgcacaatcaagtttaaggggattgcctgcgaaatcagtaaacaaagatagccttcaggaaacaaagcaaaacctggttcacatggaaggtggaaaaaaggacaaaaaaaagaagaagaaggaggaggaggaggaggaagaggaggaggaggaaaagaaaaaaccccaggactttccaacttagcatcctaccctagagcgaatcctcactgccaagtagaaagcagcttgcttcatggaaatcctaccaacctctgatgtcgtctctgtttcaggtctacagtgcctttctcccctctttaatgcctataatgcttccattttttttttattccctaatgaagaatcggcagtgagatatgccaggactgccttttcccacaggcaatgccaatctctcgctaataaaacaaaattaaattaaaaaca

SEQ ID NO: 6 - DNA, 2094 bp, Rattus norvegicus
  source 1..2094: mol_type = genomic DNA
tgtttttaatttaattttgttttattagcgagagattggcattgcctgtgggaaaaggcagtcctggcatatctcactgccgattcttcattagggaataaaaaaaaaatggaagcattataggcattaaagaggggagaaaggcactgtagacctgaaacagagacgacatcagaggttggtaggatttccatgaagcaagctgctttctacttggcagtgaggattcgctctagggtaggatgctaagttggaaagtcctggggttttttcttttcctcctcctcctcttcctcctcctcctcctccttcttcttcttttttttgtccttttttccaccttccatgtgaaccaggttttgctttgtttcctgaaggctatctttgtttactgatttcgcaggcaatccccttaaacttgattgtgcaggagcacatgcactgtccatccagaagaattgctgtgcctccgttttgacatgggtagcactttctagcactgaattcattcacatagtcttcaatagccttttccatattctgtttctttgcgtatgcatctttcattgtcaaaggaatgagattatagataggggacagtttttgactaatgagagctggagcgtcatccaaggatgaggcccagttgatgaagtcattcacatcaatcgtcttggctcctctgagaagcttctctttcaggagaactgcttgcttcctggtccctcctcttatgaatgaaataacatcatctatgatgtgatcgcggctgatgtttactactttaccatcccctgtctttaagcaatcactgtgattaacattggctgtcaatgatggtccttctaaggtggtttgtagaggcgtatatagagaaacatccaggttaaacccaagacaccgctttacatcgctcagttcaacacctttctctttcatggaagctttatccaagacatagatcagttcgtagagccctcccagggacccagagctactgtagtgagtcccataggtttccaaaaatccaaaatattctcccttttcataggaaactggtaaagcctttacatcatccaggaaagttgtcgtcagcataacgccccgattcctcatgacaaatctccccagttgaatcattcctctcacgtgcagaaacatctttttcgtctgtgacaagtaggatgacaatcgttgaaaattttctttcttgaaatatgaaaattgaaaatcaacagaagagtctttaggctttgaagagtttttttctgggctgacttcatcaactccaactttttttataggtgcttcagtgattgtgaattttagagctaaatttgcattaaaactcgtggtcctgtctcggacgatggttttgaacatttcaaactgttcttcataattctcagttctgaaatttttgtcagccttggtttcataggccagaaatgctacgttccaaggtttgcgatagtatgtcaaagtgtttccgtcccgtacccggtcacagagtccattgtagaactcattgtcaaaaggcgtgcccaggggatccatccctaagatgttgatcccatagcctgctgttcgtcccagttctgattcttctaccactcggtcacggcacgggaggcgtgggtcactttcacagtcactctcatcagaaaaatctccacagtcgttgtcaccattacacagaagtttcctctttatgcacctgcctgtttcacactgaaagtcattcccacagttttcctgtacctcttcacactcctgagtgggttcacaatgttgtctgtctcccaaagcatcagcacagcttttcccctgaaactgtccaaagacttcaatgcttcttgagcgaaacctttgtttgaggcaaggatcacactgtgaccactgactccatgtgctcattctgcagtctattggtaggagggcgtctgctgatggctcttcccggggagtgggctctggggcctgtgcattgatctccaaggcaaagattgcaatggctagggtgatggtcacgcctgaggccatgccgctcctcctaggcagccctggagtcctgagaagcatttctttgcaacc

SEQ ID NO: 7 - DNA, 2778 bp, Macaca fascicularis
  source 1..2778: mol_type = genomic DNA
atacttgttccctgtcctctggccctttgcaaataaatgccttacccgacctgctctgccaccccactcgcagccacccagcaagagcagcatgtcagcctgctggagctttgcagctgcaatctgcattttagaaataagcatcctcacagcagagtacacgcccagttatgacccacagccaacagaaagccgtggttccgcatcgcacatagactgcagaatgagcccctggagtgaatggtcacaatgcgatccttgcctcagacaaatgtttcgttcaagaagcattgaggtcttcggacaatttaatgggaaaagttgcaccgatgctgtgggagacagacgacagtgtgtgcccacagagccctgtgaggatgctgaggatgactgcggaaatgactttcaatgcggtacaggcagatgcataaagaggcgactcctgtgtaatggtgacaatgactgtggagacttttcagatgaggatgattgtgaaggtgatccccgtcccccctgcagagacagagtggtagaagagtctgagctggcacgaacagcaggctacgggatcaacattttagggatggatcccctaagcacaccttttgacaatgagttctacaatggactctgtaaccgggatcgggatggaaacactttgacatactaccgaagaccctggaacgtggcttctttgatctatgaaaccaaaggcgagaaaaatttaagaaccgaacattatgaagaacaaattgaagcatttaaaagtatcgtccaagagaagacatcaaattttaatgcagatatatctctaaaatttacacccactgaagcaaataaagttaaaactgaaaagtcttctgagaaacaagcctcttcaaattctttacgtggccagggtagttttcggttttcatattccaaaaatgaaacttaccaactatttttgtcatattcttcaaagaaggaaaaaatgttcctgcatgtgaaaggagaaattcatctgggaagatttatgatgagaaatcgtgatgttgtgctcacaacaacttttgtggatgatataaaagctttgccaactacctatgaaaagggagaatattttgcctttttggaaacctatggaacccactacagtagctctgggtctctgggaggactctatgaactaatatatgttttggataaagcttccatgaaccggaaaggtgttgaactaaaagatgtaaagagatgcctcgggtatcatctggatgtatctctggatttctctaaaatctctgctggagctaaagctgataaagatgattgtgtaaagaggggagagggtagagctgtaaacatcaccagtgatcacctcatagatgatgttatttcactcataagaggtggaaccagacaatatgcatttgaactgaaagaaaagcttctccgaggaaccatgattgatgtgactgattttgtcaactgggcctcttccataaatgatgctcctgttctcattagtcaaaaactgtctcctatatataatctggttccagtgaaaatgaaaaatgcacacctaaagaaacaaaacttggaaagagccattgaagactatatcaatgaatttagtgtaagaaaatgccactcatgccaaaatggaggtacagcaattctaatggatggaaagtgtttgtgtacctgcccattcaaatttgagggaattgcctgtgaaatcagtaaacaaaaagtttctgaaggattgccagccctagacttcccccgtgaaaaatagaactgttggcttctctgagctccagtggaagaaaagaacactaggaccttcagatcctatccctgaagataatcttagctgccaaagaaatagcaacatgcttcatgaaaatcctaccaacttctgaagtctcctctcttaggtctataattattttttaatttttctttcttaaactcctatgatgtttccattttttattccctaatgaggagtcaagagtgaaatatgccagaactgctttctcccacagacaatgccaatctcttctaaaaaaaacaaaattaaattaaaacagaatgttggtttaaaaacttcaaagtaattgtcaaactgctttgtacggttaacatattctgcccagtctatgaccacacgtctgtaccatgcaatttaactcttatttacattgttatgtttggtttggttatttgcttaggtgtgcatacattcattcagcaaatactgaacaccagccacctgcacagcagttgcttttattagtcttaactctaccatttaaatctatgtgtccaagggggaaaatgtgttatatttgtaaccaaaaactactagtttaccaaaggctggaagggtagtggggaagggagataaagaggagatgattaatacaaaaatccagttagatgaaaggaataatatatacagtgttcagcaacacaatagagtgactataaactattagcttaaattatgtgaaattgcctctatttgatcttattttacaagaaaaaaacatcaattttatatagtctaacttaatacctaggcttatgagttgtataaggtaacgttacctacctgagaagctgattaacattggctgtacaatcttatccattagagaacatgatacttagggtctgagaccttttgaaaaggtctgaaaactctttaaaaaaaaggaaagaaagaaagaaatgaggaaaaacgtatcaaaataaaaaaatgcaaaatcaaatttaataaatgcttagaca

SEQ ID NO: 8 - DNA, 2778 bp, Macaca fascicularis
  source 1..2778: mol_type = genomic DNA
tgtctaagcatttattaaatttgattttgcatttttttattttgatacgtttttcctcatttctttctttctttccttttttttaaagagttttcagaccttttcaaaaggtctcagaccctaagtatcatgttctctaatggataagattgtacagccaatgttaatcagcttctcaggtaggtaacgttaccttatacaactcataagcctaggtattaagttagactatataaaattgatgtttttttcttgtaaaataagatcaaatagaggcaatttcacataatttaagctaatagtttatagtcactctattgtgttgctgaacactgtatatattattcctttcatctaactggatttttgtattaatcatctcctctttatctcccttccccactacccttccagcctttggtaaactagtagtttttggttacaaatataacacattttcccccttggacacatagatttaaatggtagagttaagactaataaaagcaactgctgtgcaggtggctggtgttcagtatttgctgaatgaatgtatgcacacctaagcaaataaccaaaccaaacataacaatgtaaataagagttaaattgcatggtacagacgtgtggtcatagactgggcagaatatgttaaccgtacaaagcagtttgacaattactttgaagtttttaaaccaacattctgttttaatttaattttgttttttttagaagagattggcattgtctgtgggagaaagcagttctggcatatttcactcttgactcctcattagggaataaaaaatggaaacatcataggagtttaagaaagaaaaattaaaaaataattatagacctaagagaggagacttcagaagttggtaggattttcatgaagcatgttgctatttctttggcagctaagattatcttcagggataggatctgaaggtcctagtgttcttttcttccactggagctcagagaagccaacagttctatttttcacgggggaagtctagggctggcaatccttcagaaactttttgtttactgatttcacaggcaattccctcaaatttgaatgggcaggtacacaaacactttccatccattagaattgctgtacctccattttggcatgagtggcattttcttacactaaattcattgatatagtcttcaatggctctttccaagttttgtttctttaggtgtgcatttttcattttcactggaaccagattatatataggagacagtttttgactaatgagaacaggagcatcatttatggaagaggcccagttgacaaaatcagtcacatcaatcatggttcctcggagaagcttttctttcagttcaaatgcatattgtctggttccacctcttatgagtgaaataacatcatctatgaggtgatcactggtgatgtttacagctctaccctctcccctctttacacaatcatctttatcagctttagctccagcagagattttagagaaatccagagatacatccagatgatacccgaggcatctctttacatcttttagttcaacacctttccggttcatggaagctttatccaaaacatatattagttcatagagtcctcccagagacccagagctactgtagtgggttccataggtttccaaaaaggcaaaatattctcccttttcataggtagttggcaaagcttttatatcatccacaaaagttgttgtgagcacaacatcacgatttctcatcataaatcttcccagatgaatttctcctttcacatgcaggaacattttttccttctttgaagaatatgacaaaaatagttggtaagtttcatttttggaatatgaaaaccgaaaactaccctggccacgtaaagaatttgaagaggcttgtttctcagaagacttttcagttttaactttatttgcttcagtgggtgtaaattttagagatatatctgcattaaaatttgatgtcttctcttggacgatacttttaaatgcttcaatttgttcttcataatgttcggttcttaaatttttctcgcctttggtttcatagatcaaagaagccacgttccagggtcttcggtagtatgtcaaagtgtttccatcccgatcccggttacagagtccattgtagaactcattgtcaaaaggtgtgcttaggggatccatccctaaaatgttgatcccgtagcctgctgttcgtgccagctcagactcttctaccactctgtctctgcaggggggacggggatcaccttcacaatcatcctcatctgaaaagtctccacagtcattgtcaccattacacaggagtcgcctctttatgcatctgcctgtaccgcattgaaagtcatttccgcagtcatcctcagcatcctcacagggctctgtgggcacacactgtcgtctgtctcccacagcatcggtgcaacttttcccattaaattgtccgaagacctcaatgcttcttgaacgaaacatttgtctgaggcaaggatcgcattgtgaccattcactccaggggctcattctgcagtctatgtgcgatgcggaaccacggctttctgttggctgtgggtcataactgggcgtgtactctgctgtgaggatgcttatttctaaaatgcagattgcagctgcaaagctccagcaggctgacatgctgctcttgctgggtggctgcgagtggggtggcagagcaggtcgggtaaggcatttatttgcaaagggccagaggacagggaacaagtat

SEQ ID NO: 9 - protein, 16 aa, unidentified
  REGION 1..16: note = source = /note="Description of Unknown: RFGF sequence"
AAVALLPAVLLALLAP

SEQ ID NO: 10 - protein, 11 aa, unidentified
  REGION 1..11: note = source = /note="Description of Unknown: RFGF analogue sequence"
AALLPVLLAAP

SEQ ID NO: 11 - protein, 13 aa, Human immunodeficiency virus
GRKKRRQRRRPPQ

SEQ ID NO: 12 - protein, 16 aa, Drosophila sp.
RQIKIWFQNRRMKWKK

SEQ ID NO: 13 - RNA, 23 nt, synthetic construct
  source 1..23: mol_type = other RNA
  modified_base 4: mod_base = OTHER; note = 5'-methyluridine-3'-phosphate
  modified_base 8: mod_base = OTHER; note = 5'-methyluridine-3'-phosphate
  modified_base 10: mod_base = OTHER; note = 5'-methyluridine-3'-phosphate
  modified_base 12: mod_base = OTHER; note = 5'-methyluridine-3'-phosphate
  modified_base 14: mod_base = OTHER; note = 5'-methyluridine-3'-phosphate
  modified_base 17: mod_base = OTHER; note = 5'-methyluridine-3'-phosphate
  modified_base 19: mod_base = OTHER; note = 5'-methyluridine-3'-phosphate
  modified_base 20: mod_base = OTHER; note = 5'-methyluridine-3'-phosphate
acatcagtatgtatcatgttaac

SEQ ID NO: 14 - RNA, 21 nt, synthetic construct
  source 1..21: mol_type = other RNA
caagagcagcatgtcagcctt

SEQ ID NO: 15 - RNA, 21 nt, synthetic construct
  source 1..21: mol_type = other RNA
ggagctttgcagttgcaatct

SEQ ID NO: 16 - RNA, 21 nt, synthetic construct
  source 1..21: mol_type = other RNA
aatctgcattttagaaataat

SEQ ID NO: 17 - RNA, 21 nt, synthetic construct
  source 1..21: mol_type = other RNA
agaaataagcatcctcacagt

SEQ ID NO: 18 - RNA, 21 nt, synthetic construct
  source 1..21: mol_type = other RNA
cacagtacacgaccagttatt

SEQ ID NO: 19 - RNA, 21 nt, synthetic construct
  source 1..21: mol_type = other RNA
cagagctaacagaaagcagtt

SEQ ID NO: 20 - RNA, 21 nt, synthetic construct
  source 1..21: mol_type = other RNA
cagtggctctgcatcacacat

SEQ ID NO: 21 - RNA, 21 nt, synthetic construct
  source 1..21: mol_type = other RNA
atcacacatagactgcagaat

SEQ ID NO: 22 - RNA, 21 nt, synthetic construct
  source 1..21: mol_type = other RNA
gtgaatggtcacaatgcgatt

SEQ ID NO: 23 - RNA, 21 nt, synthetic construct
  source 1..21: mol_type = other RNA
tgcgatccttgtctcagacat

SEQ ID NO: 24 - RNA, 21 nt, synthetic construct
  source 1..21: mol_type = other RNA
tcagacaaatgtttcgttcat

SEQ ID NO: 25 - RNA, 21 nt, synthetic construct
  source 1..21: mol_type = other RNA
caagaagcattgaggtctttt

SEQ ID NO: 26 - RNA, 21 nt, synthetic construct
  source 1..21: mol_type = other RNA
tggacaatttaatgggaaaat

SEQ ID NO: 27 - RNA, 21 nt, synthetic construct
  source 1..21: mol_type = other RNA
ggagacagacgacagtgtgtt

SEQ ID NO: 28 - RNA, 21 nt, synthetic construct
  source 1..21: mol_type = other RNA
ctgcggaaatgactttcaatt

SEQ ID NO: 29 - RNA, 21 nt, synthetic construct
  source 1..21: mol_type = other RNA
ctttcaatgcagtacaggcat

SEQ ID NO: 30 - RNA, 21 nt, synthetic construct
  source 1..21: mol_type = other RNA
gatgcataaagatgcgacttt

SEQ ID NO: 31 - RNA, 21 nt, synthetic construct
  source 1..21: mol_type = other RNA
tgtaatggtgacaatgactgt

SEQ ID NO: 32 - RNA, 21 nt, synthetic construct
  source 1..21: mol_type = other RNA
gagacttttcagatgaggatt

SEQ ID NO: 33 - RNA, 21 nt, synthetic construct
  source 1..21: mol_type = other RNA
gaggatgattgtgaaagtgat

SEQ ID NO: 34 - RNA, 21 nt, synthetic construct
  source 1..21: mol_type = other RNA
ctgcagagacagagtggtagt

SEQ ID NO: 35 - RNA, 21 nt, synthetic construct
  source 1..21: mol_type = other RNA
gtggtagaagagtctgagctt

SEQ ID NO: 36 - RNA, 21 nt, synthetic construct
  source 1..21: mol_type = other RNA
tggcacgaacagcaggctatt

SEQ ID NO: 37 - RNA, 21 nt, synthetic construct
  source 1..21: mol_type = other RNA
ctatgggatcaacattttagt

SEQ ID NO: 38 - RNA, 21 nt, synthetic construct
  source 1..21: mol_type = other RNA
acaccttttgacaatgagttt

SEQ ID NO: 39 - RNA, 21 nt, synthetic construct
  source 1..21: mol_type = other RNA
gttctacaatggactctgtat

SEQ ID NO: 40 - RNA, 21 nt, synthetic construct
  source 1..21: mol_type = other RNA
tggaaacactctgacatactt

SEQ ID NO: 41 - RNA, 21 nt, synthetic construct
  source 1..21: mol_type = other RNA
gacatactaccgaagaccttt

SEQ ID NO: 42 - RNA, 21 nt, synthetic construct
  source 1..21: mol_type = other RNA
gaacgtggcttctttgatctt

SEQ ID NO: 43 - RNA, 21 nt, synthetic construct
  source 1..21: mol_type = other RNA
tttgatctatgaaaccaaagt

SEQ ID NO: 44 - RNA, 21 nt, synthetic construct
  source 1..21: mol_type = other RNA
aaccgaacattacgaagaact

SEQ ID NO: 45 - RNA, 21 nt, synthetic construct
  source 1..21: mol_type = other RNA
aagaacaaattgaagcatttt

SEQ ID NO: 46 - RNA, 21 nt, synthetic construct
  source 1..21: mol_type = other RNA
aagcatttaaaagtatcatct

SEQ ID NO: 47 - RNA, 21 nt, synthetic construct
  source 1..21: mol_type = other RNA
tatcatccaagagaagacatt

SEQ ID NO: 48 - RNA, 21 nt, synthetic construct
  source 1..21: mol_type = other RNA
gaagacatcaaattttaatgt

SEQ ID NO: 49 - RNA, 21 nt, synthetic construct
  source 1..21: mol_type = other RNA
tttaatgcagctatatctctt

SEQ ID NO: 50 - RNA, 21 nt, synthetic construct
  source 1..21: mol_type = other RNA
atatctctaaaatttacacct

SEQ ID NO: 51 - RNA, 21 nt, synthetic construct
  source 1..21: mol_type = other RNA
ccactgaaacaaataaagctt

SEQ ID NO: 52 - RNA, 21 nt, synthetic construct
  source 1..21: mol_type = other RNA
ctgaacaatgttgtgaggaat

SEQ ID NO: 53 - RNA, 21 nt, synthetic construct
  source 1..21: mol_type = other RNA
gtgaggaaacagcctcctcat

SEQ ID NO: 54 - RNA, 21 nt, synthetic construct
  source 1..21: mol_type = other RNA
cctcctcaatttctttacatt

SEQ ID NO: 55 - RNA, 21 nt, synthetic construct
  source 1..21: mol_type = other RNA
gcaagggtagttttcggtttt

SEQ ID NO: 56 - RNA, 21 nt, synthetic construct
  source 1..21: mol_type = other RNA
ttcggttttcatattccaaat

SEQ ID NO: 57 - RNA, 21 nt, synthetic construct
  source 1..21: mol_type = other RNA
aactatttttgtcatattctt

SEQ ID NO: 58 - RNA, 21 nt, synthetic construct
  source 1..21: mol_type = other RNA
atattcttcaaagaaggaaat

SEQ ID NO: 59 - RNA, 21 nt, synthetic construct
  source 1..21: mol_type = other RNA
atgtttctgcatgtgaaaggt

SEQ ID NO: 60 - RNA, 21 nt, synthetic construct
  source 1..21: mol_type = other RNA
tgaaaggagaaattcatctgt

SEQ ID NO: 61 - RNA, 21 nt, synthetic construct
  source 1..21: mol_type = other RNA
tctgggaagatttgtaatgat

SEQ ID NO: 62 - RNA, 21 nt, synthetic construct
  source 1..21: mol_type = other RNA
tgtaatgagaaatcgcgatgt

SEQ ID NO: 63 - RNA, 21 nt, synthetic construct
  source 1..21: mol_type = other RNA
tcgcgatgttgtgctcacaat

SEQ ID NO: 64 - RNA, 21 nt, synthetic construct
  source 1..21: mol_type = other RNA
tcacaacaacttttgtggatt

SEQ ID NO: 65 - RNA, 21 nt, synthetic construct
  source 1..21: mol_type = other RNA
gtggatgatataaaagctttt

SEQ ID NO: 66 - RNA, 21 nt, synthetic construct
  source 1..21: mol_type = other RNA
aagctttgccaactacctatt

SEQ ID NO: 67 - RNA, 21 nt, synthetic construct
  source 1..21: mol_type = other RNA
tacctatgaaaagggagaatt

SEQ ID NO: 68 - RNA, 21 nt, synthetic construct
  source 1..21: mol_type = other RNA
ttgcctttttggaaacctatt

SEQ ID NO: 69 - RNA, 21 nt, synthetic construct
  source 1..21: mol_type = other RNA
cctatggaactcactacagtt

SEQ ID NO: 70 - RNA, 21 nt, synthetic construct
  source 1..21: mol_type = other RNA
actacagtagctctgggtctt

SEQ ID NO: 71 - RNA, 21 nt, synthetic construct
  source 1..21: mol_type = other RNA
ctgggtctctaggaggactct

SEQ ID NO: 72 - RNA, 21 nt, synthetic construct
  source 1..21: mol_type = other RNA
ctctatgaactaatatatgtt

SEQ ID NO: 73 - RNA, 21 nt, synthetic construct
  source 1..21: mol_type = other RNA
tggataaagcttccatgaagt

SEQ ID NO: 74 - RNA, 21 nt, synthetic construct
  source 1..21: mol_type = other RNA
aagcggaaaggtgttgaactt

SEQ ID NO: 75 - RNA, 21 nt, synthetic construct
  source 1..21: mol_type = other RNA
gttgaactaaaagacataaat

SEQ ID NO: 76 - RNA, 21 nt, synthetic construct
  source 1..21: mol_type = other RNA
taaagagatgccttgggtatt

SEQ ID NO: 77 - RNA, 21 nt, synthetic construct
  source 1..21: mol_type = other RNA
tatcatctggatgtatctctt

SEQ ID NO: 78 - RNA, 21 nt, synthetic construct
  source 1..21: mol_type = other RNA
tatctctggctttctctgaat

SEQ ID NO: 79 - RNA, 21 nt, synthetic construct
  source 1..21: mol_type = other RNA
tctctgaaatctctgttggat

SEQ ID NO: 80 - RNA, 21 nt, synthetic construct
  source 1..21: mol_type = other RNA
ggagctgaatttaataaagat

SEQ ID NO: 81 - RNA, 21 nt, synthetic construct
  source 1..21: mol_type = other RNA
aagatgattgtgtaaagaggt

SEQ ID NO: 82 - RNA, 21 nt, synthetic construct
  source 1..21: mol_type = other RNA
gggtagagctgtaaacatcat

SEQ ID NO: 83 - RNA, 21 nt, synthetic construct
  source 1..21: mol_type = other RNA
acatcaccagtgaaaacctct

SEQ ID NO: 84 - RNA, 21 nt, synthetic construct
  source 1..21: mol_type = other RNA
ctcatagatgatgttgtttct

SEQ ID NO: 85 - RNA, 21 nt, synthetic construct
  source 1..21: mol_type = other RNA
ttgtttcactcataagaggtt

SEQ ID NO: 86 - RNA, 21 nt, synthetic construct
  source 1..21: mol_type = other RNA
gaaccagaaaatatgcatttt

SEQ ID NO: 87 - RNA, 21 nt, synthetic construct
  source 1..21: mol_type = other RNA
gaactgaaagaaaagcttctt

SEQ ID NO: 88 - RNA, 21 nt, synthetic construct
  source 1..21: mol_type = other RNA
cgaggaaccgtgattgatgtt

SEQ ID NO: 89 - RNA, 21 nt, synthetic construct
  source 1..21: mol_type = other RNA
tgatgtgactgactttgtcat

SEQ ID NO: 90 - RNA, 21 nt, synthetic construct
  source 1..21: mol_type = other RNA
cttccataaatgatgctcctt

SEQ ID NO: 91 - RNA, 21 nt, synthetic construct
  source 1..21: mol_type = other RNA
ctcctgttctcattagtcaat

SEQ ID NO: 92 - RNA, 21 nt, synthetic construct
  source 1..21: mol_type = other RNA
ctatatataatctggttccat

SEQ ID NO: 93 - RNA, 21 nt, synthetic construct
  source 1..21: mol_type = other RNA
tggttccagtgaaaatgaaat

SEQ ID NO: 94 - RNA, 21 nt, synthetic construct
  source 1..21: mol_type = other RNA
acacctaaagaaacaaaactt

SEQ ID NO: 95 - RNA, 21 nt, synthetic construct
  source 1..21: mol_type = other RNA
aaaacttggaaagagccattt

SEQ ID NO: 96 - RNA, 21 nt, synthetic construct
  source 1..21: mol_type = other RNA
gccattgaagactatatcaat

SEQ ID NO: 97 - RNA, 21 nt, synthetic construct
  source 1..21: mol_type = other RNA
tgtaagaaaatgccacacatt

SEQ ID NO: 98 - RNA, 21 nt, synthetic construct
  source 1..21: mol_type = other RNA
catgccaaaatggaggtacat

SEQ ID NO: 99 - RNA, 21 nt, synthetic construct
  source 1..21: mol_type = other RNA
gtgattctaatggatggaaat

SEQ ID NO: 100 - RNA, 21 nt, synthetic construct
  source 1..21: mol_type = other RNA
gatggaaagtgtttgtgtgct

SEQ ID NO: 101 - RNA, 21 nt, synthetic construct
  source 1..21: mol_type = other RNA
tgtgtgcctgcccattcaaat

SEQ ID NO: 102 - RNA, 21 nt, synthetic construct
  source 1..21: mol_type = other RNA
cattcaaatttgagggaattt

SEQ ID NO: 103 - RNA, 21 nt, synthetic construct
  source 1..21: mol_type = other RNA
cctgtgaaatcagtaaacaat

SEQ ID NO: 104 - RNA, 21 nt, synthetic construct
  source 1..21: mol_type = other RNA
aatttctgaaggattgccagt

SEQ ID NO: 105 - RNA, 21 nt, synthetic construct
  source 1..21: mol_type = other RNA
atagagctgttggcttctctt

SEQ ID NO: 106 - RNA, 21 nt, synthetic construct
  source 1..21: mol_type = other RNA
agtggaagaagaaaacactat

SEQ ID NO: 107 - RNA, 21 nt, synthetic construct
  source 1..21: mol_type = other RNA
aaacactagtaccttcagatt

SEQ ID NO: 108 - RNA, 21 nt, synthetic construct
  source 1..21: mol_type = other RNA
ctgaagataatcttagctgct

SEQ ID NO: 109 - RNA, 21 nt, synthetic construct
  source 1..21: mol_type = other RNA
ctgccaagtaaatagcaacat

SEQ ID NO: 110 - RNA, 21 nt, synthetic construct
  source 1..21: mol_type = other RNA
ttcatgaaaatcctaccaact

SEQ ID NO: 111 - RNA, 21 nt, synthetic construct
  source 1..21: mol_type = other RNA
tctgaagtctcttctctcttt

SEQ ID NO: 112 - RNA, 21 nt, synthetic construct
  source 1..21: mol_type = other RNA
tctctcttaggtctataattt

SEQ ID NO: 113 - RNA, 21 nt, synthetic construct
  source 1..21: mol_type = other RNA
cttccttaaactcctgtgatt

SEQ ID NO: 114 - RNA, 21 nt, synthetic construct
  source 1..21: mol_type = other RNA
cctaatgagaagtcaacagtt

SEQ ID NO: 115 - RNA, 21 nt, synthetic construct
  source 1..21: mol_type = other RNA
aacagtgaaatacgccagaat

SEQ ID NO: 116 - RNA, 21 nt, synthetic construct
  source 1..21: mol_type = other RNA
cgccagaactgctttatccct

SEQ ID NO: 117 - RNA, 21 nt, synthetic construct
  source 1..21: mol_type = other RNA
ttatcccacggaaaatgccat

SEQ ID NO: 118 - RNA, 21 nt, synthetic construct
  source 1..21: mol_type = other RNA
aaatgccaatctcttctaaat

SEQ ID NO: 119 - RNA, 21 nt, synthetic construct
  source 1..21: mol_type = other RNA
ttcaaagtaattttcaaacgt

SEQ ID NO: 120 - RNA, 21 nt, synthetic construct
  source 1..21: mol_type = other RNA
ttgtatggttaacatattctt

SEQ ID NO: 121 - RNA, 21 nt, synthetic construct
  source 1..21: mol_type = other RNA
tgccaggtccatgaccacact

SEQ ID NO: 122 - RNA, 21 nt, synthetic construct
  source 1..21: mol_type = other RNA
accacacgtctgtaccatgct

SEQ ID NO: 123 - RNA, 21 nt, synthetic construct
  source 1..21: mol_type = other RNA
ccatgcaatttaactcttatt

SEQ ID NO: 124 - RNA, 21 nt, synthetic construct
  source 1..21: mol_type = other RNA
ttggttatttgcttaggtgtt

SEQ ID NO: 125 - RNA, 21 nt, synthetic construct
  source 1..21: mol_type = other RNA
catacattcattcagcaaatt

SEQ ID NO: 126 - RNA, 21 nt, synthetic construct
  source 1..21: mol_type = other RNA
cagccacgtgcacagcagttt

SEQ ID NO: 127 - RNA, 21 nt, synthetic construct
  source 1..21: mol_type = other RNA
cagttgcttttactagtcttt

SEQ ID NO: 128 - RNA, 21 nt, synthetic construct
  source 1..21: mol_type = other RNA
ctagtcttagctctacgattt

SEQ ID NO: 129 - RNA, 21 nt, synthetic construct
  source 1..21: mol_type = other RNA
acgatttaaatccatgtgtct

SEQ ID NO: 130 - RNA, 21 nt, synthetic construct
  source 1..21: mol_type = other RNA
actactagtttaccagaggat

SEQ ID NO: 131 - RNA, 21 nt, synthetic construct
  source 1..21: mol_type = other RNA
aagggagataaagaggagttt

SEQ ID NO: 132 - RNA, 21 nt, synthetic construct
  source 1..21: mol_type = other RNA
gagttggttaatgggtacaat

SEQ ID NO: 133 - RNA, 21 nt, synthetic construct
  source 1..21: mol_type = other RNA
atccagttagatgaaaggaat

SEQ ID NO: 134 - RNA, 21 nt, synthetic construct
  source 1..21: mol_type = other RNA
aaggaataatatagatagtgt

SEQ ID NO: 135 - RNA, 21 nt, synthetic construct
  source 1..21: mol_type = other RNA
gatagtgttcagtagcagaat

SEQ ID NO: 136 - RNA, 21 nt, synthetic construct
  source 1..21: mol_type = other RNA
gaatagaatgaacataaactt

SEQ ID NO: 137 - RNA, 21 nt, synthetic construct
  source 1..21: mol_type = other RNA
aattccttctatttgatcatt

SEQ ID NO: 138 - RNA, 21 nt, synthetic construct
  source 1..21: mol_type = other RNA
tagtccaacttaatacctagt

SEQ ID NO: 139 - RNA, 21 nt, synthetic construct
  source 1..21: mol_type = other RNA
ctagccttatgagttgtatat

SEQ ID NO: 140 - RNA, 21 nt, synthetic construct
  source 1..21: mol_type = other RNA
tataaggtaaggttacctact

SEQ ID NO: 141 - RNA, 21 nt, synthetic construct
  source 1..21: mol_type = other RNA
tacctacctgagaagctgatt

SEQ ID NO: 142 - RNA, 21 nt, synthetic construct
  source 1..21: mol_type = other RNA
agctgattaacattggttgtt

SEQ ID NO: 143 - RNA, 21 nt, synthetic construct
  source 1..21: mol_type = other RNA
ttgtacaatcttattcattat

SEQ ID NO: 144 - RNA, 21 nt, synthetic construct
  source 1..21: mol_type = other RNA
attagagaacatggtgcttat

SEQ ID NO: 145 - RNA, 21 nt, synthetic construct
  source 1..21: mol_type = other RNA
ggtgcttagggtctgagacct

SEQ ID NO: 146 - RNA, 21 nt, synthetic construct
  source 1..21: mol_type = other RNA
tgagaccttttgaaaggtctt

SEQ ID NO: 147 - RNA, 21 nt, synthetic construct
  source 1..21: mol_type = other RNA
aaaggtctgagaactctttat

SEQ ID NO: 148 - RNA, 21 nt, synthetic construct
  source 1..21: mol_type = other RNA
atcagtatgtatcatgttaat

SEQ ID NO: 149 - RNA, 23 nt, synthetic construct
  source 1..23: mol_type = other RNA
aaggctgacatgctgctcttgct

SEQ ID NO: 150 - RNA, 23 nt, synthetic construct
  source 1..23: mol_type = other RNA
agattgcaactgcaaagctccgg

SEQ ID NO: 151 - RNA, 23 nt, synthetic construct
  source 1..23: mol_type = other RNA
attatttctaaaatgcagattgc

SEQ ID NO: 152 - RNA, 23 nt, synthetic construct
  source 1..23: mol_type = other RNA
actgtgaggatgcttatttctaa

SEQ ID NO: 153 - RNA, 23 nt, synthetic construct
  source 1..23: mol_type = other RNA
aataactggtcgtgtactgtgct

SEQ ID NO: 154 - RNA, 23 nt, synthetic construct
  source 1..23: mol_type = other RNA
aactgctttctgttagctctggg

SEQ ID NO: 155 - RNA, 23 nt, synthetic construct
  source 1..23: mol_type = other RNA
atgtgtgatgcagagccactgct

SEQ ID NO: 156 - RNA, 23 nt, synthetic construct
  source 1..23: mol_type = other RNA
attctgcagtctatgtgtgatgc

SEQ ID NO: 157 - RNA, 23 nt, synthetic construct
  source 1..23: mol_type = other RNA
aatcgcattgtgaccattcactc

SEQ ID NO: 158 - RNA, 23 nt, synthetic construct
  source 1..23: mol_type = other RNA
atgtctgagacaaggatcgcatt

SEQ ID NO: 159 - RNA, 23 nt, synthetic construct
  source 1..23: mol_type = other RNA
atgaacgaaacatttgtctgaga

SEQ ID NO: 160 - RNA, 23 nt, synthetic construct
  source 1..23: mol_type = other RNA
aaaagacctcaatgcttcttgaa

SEQ ID NO: 161 - RNA, 23 nt, synthetic construct
  source 1..23: mol_type = other RNA
attttcccattaaattgtccaaa

SEQ ID NO: 162 - RNA, 23 nt, synthetic construct
  source 1..23: mol_type = other RNA
aacacactgtcgtctgtctccca

SEQ ID NO: 163 - RNA, 23 nt, synthetic construct
  source 1..23: mol_type = other RNA
aattgaaagtcatttccgcagtc

SEQ ID NO: 164 - RNA, 23 nt, synthetic construct
  source 1..23: mol_type = other RNA
atgcctgtactgcattgaaagtc

SEQ ID NO: 165 - RNA, 23 nt, synthetic construct
  source 1..23: mol_type = other RNA
aaagtcgcatctttatgcatctg

SEQ ID NO: 166 - RNA, 23 nt, synthetic construct
  source 1..23: mol_type = other RNA
acagtcattgtcaccattacacc

SEQ ID NO: 167 - RNA, 23 nt, synthetic construct
  source 1..23: mol_type = other RNA
aatcctcatctgaaaagtctccg

SEQ ID NO: 168 - RNA, 23 nt, synthetic construct
  source 1..23: mol_type = other RNA
atcactttcacaatcatcctcat

SEQ ID NO: 169 - RNA, 23 nt, synthetic construct
  source 1..23: mol_type = other RNA
actaccactctgtctctgcaggg

SEQ ID NO: 170 - RNA, 23 nt, synthetic construct
  source 1..23: mol_type = other RNA
aagctcagactcttctaccactc

SEQ ID NO: 171 - RNA, 23 nt, synthetic construct
  source 1..23: mol_type = other RNA
aatagcctgctgttcgtgccagc

SEQ ID NO: 172 - RNA, 23 nt, synthetic construct
  source 1..23: mol_type = other RNA
actaaaatgttgatcccatagcc

SEQ ID NO: 173 - RNA, 23 nt, synthetic construct
  source 1..23: mol_type = other RNA
aaactcattgtcaaaaggtgtgc

SEQ ID NO: 174 - RNA, 23 nt, synthetic construct
  source 1..23: mol_type = other RNA
atacagagtccattgtagaactc

SEQ ID NO: 175 - RNA, 23 nt, synthetic construct
  source 1..23: mol_type = other RNA
aagtatgtcagagtgtttccatc

SEQ ID NO: 176 - RNA, 23 nt, synthetic construct
  source 1..23: mol_type = other RNA
aaaggtcttcggtagtatgtcag

SEQ ID NO: 177 - RNA, 23 nt, synthetic construct
  source 1..23: mol_type = other RNA
aagatcaaagaagccacgttcca

SEQ ID NO: 178 - RNA, 23 nt, synthetic construct
  source 1..23: mol_type = other RNA
actttggtttcatagatcaaaga

SEQ ID NO: 179 - RNA, 23 nt, synthetic construct
  source 1..23: mol_type = other RNA
agttcttcgtaatgttcggttct

SEQ ID NO: 180 - RNA, 23 nt, synthetic construct
  source 1..23: mol_type = other RNA
aaaatgcttcaatttgttcttcg

SEQ ID NO: 181 - RNA, 23 nt, synthetic construct
  source 1..23: mol_type = other RNA
agatgatacttttaaatgcttca

SEQ ID NO: 182 - RNA, 23 nt, synthetic construct
  source 1..23: mol_type = other RNA
aatgtcttctcttggatgatact

SEQ ID NO: 183 - RNA, 23 nt, synthetic construct
  source 1..23: mol_type = other RNA
acattaaaatttgatgtcttctc

SEQ ID NO: 184 - RNA, 23 nt, synthetic construct
  source 1..23: mol_type = other RNA
aagagatatagctgcattaaaat

SEQ ID NO: 185 - RNA, 23 nt, synthetic construct
  source 1..23: mol_type = other RNA
aggtgtaaattttagagatatag

SEQ ID NO: 186 - RNA, 23 nt, synthetic construct
  source 1..23: mol_type = other RNA
aagctttatttgtttcagtgggt

SEQ ID NO: 187 - RNA, 23 nt, synthetic construct
  source 1..23: mol_type = other RNA
attcctcacaacattgttcagct

SEQ ID NO: 188 - RNA, 23 nt, synthetic construct
  source 1..23: mol_type = other RNA
atgaggaggctgtttcctcacaa

SEQ ID NO: 189 - RNA, 23 nt, synthetic construct
  source 1..23: mol_type = other RNA
aatgtaaagaaattgaggaggct

SEQ ID NO: 190 - RNA, 23 nt, synthetic construct
  source 1..23: mol_type = other RNA
aaaaccgaaaactacccttgcca

SEQ ID NO: 191 - RNA, 23 nt, synthetic construct
  source 1..23: mol_type = other RNA
atttggaatatgaaaaccgaaaa

SEQ ID NO: 192 - RNA, 23 nt, synthetic construct
  source 1..23: mol_type = other RNA
aagaatatgacaaaaatagttgg

SEQ ID NO: 193 - RNA, 23 nt, synthetic construct
  source 1..23: mol_type = other RNA
atttccttctttgaagaatatga

SEQ ID NO: 194 - RNA, 23 nt, synthetic construct
  source 1..23: mol_type = other RNA
acctttcacatgcagaaacattt

SEQ ID NO: 195 - RNA, 23 nt, synthetic construct
  source 1..23: mol_type = other RNA
acagatgaatttctcctttcaca

SEQ ID NO: 196 - RNA, 23 nt, synthetic construct
  source 1..23: mol_type = other RNA
atcattacaaatcttcccagatg

SEQ ID NO: 197 - RNA, 23 nt, synthetic construct
  source 1..23: mol_type = other RNA
acatcgcgatttctcattacaaa

SEQ ID NO: 198 - RNA, 23 nt, synthetic construct
  source 1..23: mol_type = other RNA
attgtgagcacaacatcgcgatt

SEQ ID NO: 199 - RNA, 23 nt, synthetic construct
  source 1..23: mol_type = other RNA
aatccacaaaagttgttgtgagc

SEQ ID NO: 200 - RNA, 23 nt, synthetic construct
  source 1..23: mol_type = other RNA
aaaagcttttatatcatccacaa

SEQ ID NO: 201 - RNA, 23 nt, synthetic construct
  source 1..23: mol_type = other RNA
aataggtagttggcaaagctttt

SEQ ID NO: 202 - RNA, 23 nt, synthetic construct
  source 1..23: mol_type = other RNA
aattctcccttttcataggtagt

SEQ ID NO: 203 - RNA, 23 nt, synthetic construct
  source 1..23: mol_type = other RNA
aataggtttccaaaaaggcaaaa

SEQ ID NO: 204 - RNA, 23 nt, synthetic construct
  source 1..23: mol_type = other RNA
aactgtagtgagttccataggtt

SEQ ID NO: 205 - RNA, 23 nt, synthetic construct
  source 1..23: mol_type = other RNA
aagacccagagctactgtagtga

SEQ ID NO: 206 - RNA, 23 nt, synthetic construct
  source 1..23: mol_type = other RNA
agagtcctcctagagacccagag

SEQ ID NO: 207 - RNA, 23 nt, synthetic construct
  source 1..23: mol_type = other RNA
aacatatattagttcatagagtc

SEQ ID NO: 208 - RNA, 23 nt, synthetic construct
  source 1..23: mol_type = other RNA
acttcatggaagctttatccaaa

SEQ ID NO: 209 - RNA, 23 nt, synthetic construct
  source 1..23: mol_type = other RNA
aagttcaacacctttccgcttca

SEQ ID NO: 210 - RNA, 23 nt, synthetic construct
  source 1..23: mol_type = other RNA
atttatgtcttttagttcaacac

SEQ ID NO: 211 - RNA, 23 nt, synthetic construct
  source 1..23: mol_type = other RNA
aatacccaaggcatctctttatg

SEQ ID NO: 212 - RNA, 23 nt, synthetic construct
  source 1..23: mol_type = other RNA
aagagatacatccagatgatacc

SEQ ID NO: 213 - RNA, 23 nt, synthetic construct
  source 1..23: mol_type = other RNA
attcagagaaagccagagataca

SEQ ID NO: 214 - RNA, 23 nt, synthetic construct
  source 1..23: mol_type = other RNA
atccaacagagatttcagagaaa

SEQ ID NO: 215 - RNA, 23 nt, synthetic construct
  source 1..23: mol_type = other RNA
atctttattaaattcagctccaa

SEQ ID NO: 216 - RNA, 23 nt, synthetic construct
  source 1..23: mol_type = other RNA
acctctttacacaatcatcttta

SEQ ID NO: 217 - RNA, 23 nt, synthetic construct
  source 1..23: mol_type = other RNA
atgatgtttacagctctaccctc

SEQ ID NO: 218 - RNA, 23 nt, synthetic construct
  source 1..23: mol_type = other RNA
agaggttttcactggtgatgttt

SEQ ID NO: 219 - RNA, 23 nt, synthetic construct
  source 1..23: mol_type = other RNA
agaaacaacatcatctatgaggt

SEQ ID NO: 220 - RNA, 23 nt, synthetic construct
  source 1..23: mol_type = other RNA
aacctcttatgagtgaaacaaca

SEQ ID NO: 221 - RNA, 23 nt, synthetic construct
  source 1..23: mol_type = other RNA
aaaatgcatattttctggttcca

SEQ ID NO: 222 - RNA, 23 nt, synthetic construct
  source 1..23: mol_type = other RNA
aagaagcttttctttcagttcaa

SEQ ID NO: 223 - RNA, 23 nt, synthetic construct
  source 1..23: mol_type = other RNA
aacatcaatcacggttcctcgga

SEQ ID NO: 224 - RNA, 23 nt, synthetic construct
  source 1..23: mol_type = other RNA
atgacaaagtcagtcacatcaat

SEQ ID NO: 225 - RNA, 23 nt, synthetic construct
  source 1..23: mol_type = other RNA
aaggagcatcatttatggaagag

SEQ ID NO: 226 - RNA, 23 nt, synthetic construct
  source 1..23: mol_type = other RNA
attgactaatgagaacaggagca

SEQ ID NO: 227 - RNA, 23 nt, synthetic construct
  source 1..23: mol_type = other RNA
atggaaccagattatatatagga

SEQ ID NO: 228 - RNA, 23 nt, synthetic construct
  source 1..23: mol_type = other RNA
atttcattttcactggaaccaga

SEQ ID NO: 229 - RNA, 23 nt, synthetic construct
  source 1..23: mol_type = other RNA
aagttttgtttctttaggtgtgc

SEQ ID NO: 230 - RNA, 23 nt, synthetic construct
  source 1..23: mol_type = other RNA
aaatggctctttccaagttttgt

SEQ ID NO: 231 - RNA, 23 nt, synthetic construct
  source 1..23: mol_type = other RNA
attgatatagtcttcaatggctc

SEQ ID NO: 232 - RNA, 23 nt, synthetic construct
  source 1..23: mol_type = other RNA
aatgtgtggcattttcttacact

SEQ ID NO: 233 - RNA, 23 nt, synthetic construct
  source 1..23: mol_type = other RNA
atgtacctccattttggcatgtg

SEQ ID NO: 234 - RNA, 23 nt, synthetic construct
  source 1..23: mol_type = other RNA
atttccatccattagaatcactg

SEQ ID NO: 235 - RNA, 23 nt, synthetic construct
  source 1..23: mol_type = other RNA
agcacacaaacactttccatcca

SEQ ID NO: 236 - RNA, 23 nt, synthetic construct
  source 1..23: mol_type = other RNA
atttgaatgggcaggcacacaaa

SEQ ID NO: 237 - RNA, 23 nt, synthetic construct
  source 1..23: mol_type = other RNA
aaattccctcaaatttgaatggg

SEQ ID NO: 238 - RNA, 23 nt, synthetic construct
  source 1..23: mol_type = other RNA
attgtttactgatttcacaggca

SEQ ID NO: 239 - RNA, 23 nt, synthetic construct
  source 1..23: mol_type = other RNA
actggcaatccttcagaaatttt

SEQ ID NO: 240 - RNA, 23 nt, synthetic construct
  source 1..23: mol_type = other RNA
aagagaagccaacagctctattt

SEQ ID NO: 241 - RNA, 23 nt, synthetic construct
  source 1..23: mol_type = other RNA
atagtgttttcttcttccactgg

SEQ ID NO: 242 - RNA, 23 nt, synthetic construct
  source 1..23: mol_type = other RNA
aatctgaaggtactagtgttttc

SEQ ID NO: 243 - RNA, 23 nt, synthetic construct
  source 1..23: mol_type = other RNA
agcagctaagattatcttcaggg

SEQ ID NO: 244 - RNA, 23 nt, synthetic construct
  source 1..23: mol_type = other RNA
atgttgctatttacttggcagct

SEQ ID NO: 245 - RNA, 23 nt, synthetic construct
  source 1..23: mol_type = other RNA
agttggtaggattttcatgaagc

SEQ ID NO: 246 - RNA, 23 nt, synthetic construct
  source 1..23: mol_type = other RNA
aaagagagaagagacttcagagg

SEQ ID NO: 247 - RNA, 23 nt, synthetic construct
  source 1..23: mol_type = other RNA
aaattatagacctaagagagaag

SEQ ID NO: 248 - RNA, 23 nt, synthetic construct
  source 1..23: mol_type = other RNA
aatcacaggagtttaaggaagaa

SEQ ID NO: 249 - RNA, 23 nt, synthetic construct
  source 1..23: mol_type = other RNA
aactgttgacttctcattaggga

SEQ ID NO: 250 - RNA, 23 nt, synthetic construct
  source 1..23: mol_type = other RNA
attctggcgtatttcactgttga

SEQ ID NO: 251 - RNA, 23 nt, synthetic construct
  source 1..23: mol_type = other RNA
agggataaagcagttctggcgta

SEQ ID NO: 252 - RNA, 23 nt, synthetic construct
  source 1..23: mol_type = other RNA
atggcattttccgtgggataaag

SEQ ID NO: 253 - RNA, 23 nt, synthetic construct
  source 1..23: mol_type = other RNA
atttagaagagattggcattttc

SEQ ID NO: 254 - RNA, 23 nt, synthetic construct
  source 1..23: mol_type = other RNA
acgtttgaaaattactttgaagt

SEQ ID NO: 255 - RNA, 23 nt, synthetic construct
  source 1..23: mol_type = other RNA
aagaatatgttaaccatacaaag

SEQ ID NO: 256 - RNA, 23 nt, synthetic construct
  source 1..23: mol_type = other RNA
agtgtggtcatggacctggcaga

SEQ ID NO: 257 - RNA, 23 nt, synthetic construct
  source 1..23: mol_type = other RNA
agcatggtacagacgtgtggtca

SEQ ID NO: 258 - RNA, 23 nt, synthetic construct
  source 1..23: mol_type = other RNA
aataagagttaaattgcatggta

SEQ ID NO: 259 - RNA, 23 nt, synthetic construct
  source 1..23: mol_type = other RNA
aacacctaagcaaataaccaaac

SEQ ID NO: 260 - RNA, 23 nt, synthetic construct
  source 1..23: mol_type = other RNA
aatttgctgaatgaatgtatgca

SEQ ID NO: 261 - RNA, 23 nt, synthetic construct
  source 1..23: mol_type = other RNA
aaactgctgtgcacgtggctggt

SEQ ID NO: 262 - RNA, 23 nt, synthetic construct
  source 1..23: mol_type = other RNA
aaagactagtaaaagcaactgct

SEQ ID NO: 263 - RNA, 23 nt, synthetic construct
  source 1..23: mol_type = other RNA
aaatcgtagagctaagactagta

SEQ ID NO: 264 - RNA, 23 nt, synthetic construct
  source 1..23: mol_type = other RNA
agacacatggatttaaatcgtag

SEQ ID NO: 265 - RNA, 23 nt, synthetic construct
  source 1..23: mol_type = other RNA
atcctctggtaaactagtagttt

SEQ ID NO: 266 - RNA, 23 nt, synthetic construct
  source 1..23: mol_type = other RNA
aaactcctctttatctcccttca

SEQ ID NO: 267 - RNA, 23 nt, synthetic construct
  source 1..23: mol_type = other RNA
attgtacccattaaccaactcct

SEQ ID NO: 268 - RNA, 23 nt, synthetic construct
  source 1..23: mol_type = other RNA
attcctttcatctaactggattt

SEQ ID NO: 269 - RNA, 23 nt, synthetic construct
  source 1..23: mol_type = other RNA
acactatctatattattcctttc

SEQ ID NO: 270 - RNA, 23 nt, synthetic construct
  source 1..23: mol_type = other RNA
attctgctactgaacactatcta

SEQ ID NO: 271 - RNA, 23 nt, synthetic construct
  source 1..23: mol_type = other RNA
aagtttatgttcattctattctg

SEQ ID NO: 272 - RNA, 23 nt, synthetic construct
  source 1..23: mol_type = other RNA
aatgatcaaatagaaggaatttc

SEQ ID NO: 273 - RNA, 23 nt, synthetic construct
  source 1..23: mol_type = other RNA
actaggtattaagttggactata

SEQ ID NO: 274 - RNA, 23 nt, synthetic construct
  source 1..23: mol_type = other RNA
atatacaactcataaggctaggt

SEQ ID NO: 275 - RNA, 23 nt, synthetic construct
  source 1..23: mol_type = other RNA
agtaggtaaccttaccttataca

SEQ ID NO: 276 - RNA, 23 nt, synthetic construct
  source 1..23: mol_type = other RNA
aatcagcttctcaggtaggtaac

SEQ ID NO: 277 - RNA, 23 nt, synthetic construct
  source 1..23: mol_type = other RNA
aacaaccaatgttaatcagcttc

SEQ ID NO: 278 - RNA, 23 nt, synthetic construct
  source 1..23: mol_type = other RNA
ataatgaataagattgtacaacc

SEQ ID NO: 279 - RNA, 23 nt, synthetic construct
  source 1..23: mol_type = other RNA
ataagcaccatgttctctaatga

SEQ ID NO: 280 - RNA, 23 nt, synthetic construct
  source 1..23: mol_type = other RNA
aggtctcagaccctaagcaccat

SEQ ID NO: 281 - RNA, 23 nt, synthetic construct
  source 1..23: mol_type = other RNA
aagacctttcaaaaggtctcaga

SEQ ID NO: 282 - RNA, 23 nt, synthetic construct
  source 1..23: mol_type = other RNA
ataaagagttctcagacctttca

SEQ ID NO: 283 - RNA, 23 nt, synthetic construct
  source 1..23: mol_type = other RNA
attaacatgatacatactgatgt

SEQ ID NO: 284 - RNA, 21 nt, synthetic construct
  source 1..21: mol_type = other RNA
  modified_base 1: mod_base = OTHER; note = 2'-O-methylcytidine-3'-phosphorothioate
  modified_base 2: mod_base = OTHER; note = 2'-O-methyladenosine-3'-phosphorothioate
  modified_base 3: mod_base = OTHER; note = 2'-O-methyladenosine-3'-phosphate
  modified_base 4: mod_base = OTHER; note = 2'-O-methylguanosine-3'-phosphate
  modified_base 5: mod_base = OTHER; note = 2'-O-methyladenosine-3'-phosphate
  modified_base 6: mod_base = OTHER; note = 2'-O-methylguanosine-3'-phosphate
  modified_base 7: mod_base = OTHER; note = 2'-deoxy-2'-fluorocytidine-3'-phosphate
  modified_base 8: mod_base = OTHER; note = 2'-O-methyladenosine-3'-phosphate
  modified_base 9: mod_base = OTHER; note = 2'-deoxy-2'-fluoroguanosine-3'-phosphate
  modified_base 10: mod_base = OTHER; note = 2'-deoxy-2'-fluorocytidine-3'-phosphate
  modified_base 11: mod_base = OTHER; note = 2'-deoxy-2'-fluoroadenosine-3'-phosphate
  modified_base 12: mod_base = OTHER; note = 2'-O-methyluridine-3'-phosphate
  modified_base 13: mod_base = OTHER; note = 2'-O-methylguanosine-3'-phosphate
  modified_base 14: mod_base = OTHER; note = 2'-O-methyluridine-3'-phosphate
  modified_base 15: mod_base = OTHER; note = 2'-O-methylcytidine-3'-phosphate
  modified_base 16: mod_base = OTHER; note = 2'-O-methyladenosine-3'-phosphate
  modified_base 17: mod_base = OTHER; note = 2'-O-methylguanosine-3'-phosphate
  modified_base 18: mod_base = OTHER; note = 2'-O-methylcytidine-3'-phosphate
  modified_base 19: mod_base = OTHER; note = 2'-O-methylcytidine-3'-phosphate
  modified_base 20: mod_base = OTHER; note = 2'-O-methyluridine-3'-phosphate
  modified_base 21: mod_base = OTHER; note = 2'-O-methyluridine-3'-phosphate ((2S,4R)-1-[29-[[2-(acetylamino)-2-deoxy-beta-D-galactopyra nosyl]oxy]-14,14-bis[[3-[[3-[[5-[[2-(acetylamino)-2-deoxy-b eta-D-galactopyranosyl]oxy]-1-oxopentyl]amino]propyl]amino] -3-oxopropoxy]methyl]-1,12,19,25-tetraoxo-16-oxa-13,20,24-t riazanonacos-1-yl]-4-hydroxy-2-pyrrolidinyl)methyl ester
caagagcagcatgtcagcctt

SEQ ID NO: 285 - RNA, 21 nt, synthetic construct
  source 1..21: mol_type = other RNA
  modified_base 1: mod_base = OTHER; note = 2'-O-methylguanosine-3'-phosphorothioate
  modified_base 2: mod_base = OTHER; note = 2'-O-methylguanosine-3'-phosphorothioate
  modified_base 3: mod_base = OTHER; note = 2'-O-methyladenosine-3'-phosphate
  modified_base 4: mod_base = OTHER; note = 2'-O-methylguanosine-3'-phosphate
  modified_base 5: mod_base = OTHER; note = 2'-O-methylcytidine-3'-phosphate
  modified_base 6: mod_base = OTHER; note = 2'-O-methyluridine-3'-phosphate
  modified_base 7: mod_base = OTHER; note = 2'-deoxy-2'-fluorouridine-3'-phosphate
  modified_base 8: mod_base = OTHER; note = 2'-O-methyluridine-3'-phosphate
  modified_base 9: mod_base = OTHER; note = 2'-deoxy-2'-fluoroguanosine-3'-phosphate
  modified_base 10: mod_base = OTHER; note = 2'-deoxy-2'-fluorocytidine-3'-phosphate
  modified_base 11: mod_base = OTHER; note = 2'-deoxy-2'-fluoroadenosine-3'-phosphate
  modified_base 12: mod_base = OTHER; note = 2'-O-methylguanosine-3'-phosphate
  modified_base 13: mod_base = OTHER; note = 2'-O-methyluridine-3'-phosphate
  modified_base 14: mod_base = OTHER; note = 2'-O-methyluridine-3'-phosphate
  modified_base 15: mod_base = OTHER; note = 2'-O-methylguanosine-3'-phosphate
  modified_base 16: mod_base = OTHER; note = 2'-O-methylcytidine-3'-phosphate
  modified_base 17: mod_base = OTHER; note = 2'-O-methyladenosine-3'-phosphate
  modified_base 18: mod_base = OTHER; note = 2'-O-methyladenosine-3'-phosphate
  modified_base 19: mod_base = OTHER; note = 2'-O-methyluridine-3'-phosphate
  modified_base 20: mod_base = OTHER; note = 2'-O-methylcytidine-3'-phosphate
  modified_base 21: mod_base = OTHER; note = 2'-O-methyluridine-3'-phosphate ((2S,4R)-1-[29-[[2-(acetylamino)-2-deoxy-beta-D-galactopyra nosyl]oxy]-14,14-bis[[3-[[3-[[5-[[2-(acetylamino)-2-deoxy-b eta-D-galactopyranosyl]oxy]-1-oxopentyl]amino]propyl]amino] -3-oxopropoxy]methyl]-1,12,19,25-tetraoxo-16-oxa-13,20,24-t riazanonacos-1-yl]-4-hydroxy-2-pyrrolidinyl)methyl ester
ggagctttgcagttgcaatct

SEQ ID NO: 286 - RNA, 21 nt, synthetic construct
  source 1..21: mol_type = other RNA
  modified_base 1: mod_base = OTHER; note = 2'-O-methyladenosine-3'-phosphorothioate
  modified_base 2: mod_base = OTHER; note = 2'-O-methyladenosine-3'-phosphorothioate
  modified_base 3: mod_base = OTHER; note = 2'-O-methyluridine-3'-phosphate
  modified_base 4: mod_base = OTHER; note = 2'-O-methylcytidine-3'-phosphate
  modified_base 5: mod_base = OTHER; note = 2'-O-methyluridine-3'-phosphate
  modified_base 6: mod_base = OTHER; note = 2'-O-methylguanosine-3'-phosphate
  modified_base 7: mod_base = OTHER; note = 2'-deoxy-2'-fluorocytidine-3'-phosphate
  modified_base 8: mod_base = OTHER; note = 2'-O-methyladenosine-3'-phosphate
  modified_base 9: mod_base = OTHER; note = 2'-deoxy-2'-fluorouridine-3'-phosphate
  modified_base 10: mod_base = OTHER; note = 2'-deoxy-2'-fluorouridine-3'-phosphate
  modified_base 11: mod_base = OTHER; note = 2'-deoxy-2'-fluorouridine-3'-phosphate
  modified_base 12: mod_base = OTHER; note = 2'-O-methyluridine-3'-phosphate
  modified_base 13: mod_base = OTHER; note = 2'-O-methyladenosine-3'-phosphate
  modified_base 14: mod_base = OTHER; note = 2'-O-methylguanosine-3'-phosphate
  modified_base 15: mod_base = OTHER; note = 2'-O-methyladenosine-3'-phosphate
  modified_base 16: mod_base = OTHER; note = 2'-O-methyladenosine-3'-phosphate
  modified_base 17: mod_base = OTHER; note = 2'-O-methyladenosine-3'-phosphate
  modified_base 18: mod_base = OTHER; note = 2'-O-methyluridine-3'-phosphate
  modified_base 19: mod_base = OTHER; note = 2'-O-methyladenosine-3'-phosphate
  modified_base 20: mod_base = OTHER; note = 2'-O-methyladenosine-3'-phosphate
  modified_base 21: mod_base = OTHER; note = 2'-O-methyluridine-3'-phosphate ((2S,4R)-1-[29-[[2-(acetylamino)-2-deoxy-beta-D-galactopyra nosyl]oxy]-14,14-bis[[3-[[3-[[5-[[2-(acetylamino)-2-deoxy-b eta-D-galactopyranosyl]oxy]-1-oxopentyl]amino]propyl]amino] -3-oxopropoxy]methyl]-1,12,19,25-tetraoxo-16-oxa-13,20,24-t riazanonacos-1-yl]-4-hydroxy-2-pyrrolidinyl)methyl ester
aatctgcattttagaaataat

SEQ ID NO: 287 - RNA, 21 nt, synthetic construct
  source 1..21: mol_type = other RNA
  modified_base 1: mod_base = OTHER; note = 2'-O-methyladenosine-3'-phosphorothioate
  modified_base 2: mod_base = OTHER; note = 2'-O-methylguanosine-3'-phosphorothioate
  modified_base 3: mod_base = OTHER; note = 2'-O-methyladenosine-3'-phosphate
  modified_base 4: mod_base = OTHER; note = 2'-O-methyladenosine-3'-phosphate
  modified_base 5: mod_base = OTHER; note = 2'-O-methyladenosine-3'-phosphate
  modified_base 6: mod_base = OTHER; note = 2'-O-methyluridine-3'-phosphate
  modified_base 7: mod_base = OTHER; note = 2'-deoxy-2'-fluoroadenosine-3'-phosphate
  modified_base 8: mod_base = OTHER; note = 2'-O-methyladenosine-3'-phosphate
  modified_base 9: mod_base = OTHER; note = 2'-deoxy-2'-fluoroguanosine-3'-phosphate
  modified_base 10: mod_base = OTHER; note = 2'-deoxy-2'-fluorocytidine-3'-phosphate
  modified_base 11: mod_base = OTHER; note = 2'-deoxy-2'-fluoroadenosine-3'-phosphate
  modified_base 12: mod_base = OTHER; note = 2'-O-methyluridine-3'-phosphate
  modified_base 13: mod_base = OTHER; note = 2'-O-methylcytidine-3'-phosphate
  modified_base 14: mod_base = OTHER; note = 2'-O-methylcytidine-3'-phosphate
  modified_base 15: mod_base = OTHER; note = 2'-O-methyluridine-3'-phosphate
  modified_base 16: mod_base = OTHER; note = 2'-O-methylcytidine-3'-phosphate
  modified_base 17: mod_base = OTHER; note = 2'-O-methyladenosine-3'-phosphate
  modified_base 18: mod_base = OTHER; note = 2'-O-methylcytidine-3'-phosphate
  modified_base 19: mod_base = OTHER; note = 2'-O-methyladenosine-3'-phosphate
  modified_base 20: mod_base = OTHER; note = 2'-O-methylguanosine-3'-phosphate
  modified_base 21: mod_base = OTHER; note = 2'-O-methyluridine-3'-phosphate ((2S,4R)-1-[29-[[2-(acetylamino)-2-deoxy-beta-D-galactopyra nosyl]oxy]-14,14-bis[[3-[[3-[[5-[[2-(acetylamino)-2-deoxy-b eta-D-galactopyranosyl]oxy]-1-oxopentyl]amino]propyl]amino] -3-oxopropoxy]methyl]-1,12,19,25-tetraoxo-16-oxa-13,20,24-t riazanonacos-1-yl]-4-hydroxy-2-pyrrolidinyl)methyl ester
agaaataagcatcctcacagt

SEQ ID NO: 288 - RNA, 21 nt, synthetic construct
  source 1..21: mol_type = other RNA
  modified_base 1: mod_base = OTHER; note = 2'-O-methylcytidine-3'-phosphorothioate
  modified_base 2: mod_base = OTHER; note = 2'-O-methyladenosine-3'-phosphorothioate
  modified_base 3: mod_base = OTHER; note = 2'-O-methylcytidine-3'-phosphate
  modified_base 4: mod_base = OTHER; note = 2'-O-methyladenosine-3'-phosphate
  modified_base 5: mod_base = OTHER; note = 2'-O-methylguanosine-3'-phosphate
  modified_base 6: mod_base = OTHER; note = 2'-O-methyluridine-3'-phosphate
  modified_base 7: mod_base = OTHER; note = 2'-deoxy-2'-fluoroadenosine-3'-phosphate
  modified_base 8: mod_base = OTHER; note = 2'-O-methylcytidine-3'-phosphate
  modified_base 9: mod_base = OTHER; note = 2'-deoxy-2'-fluoroadenosine-3'-phosphate
  modified_base 10: mod_base = OTHER; note = 2'-deoxy-2'-fluorocytidine-3'-phosphate
  modified_base 11: mod_base = OTHER; note = 2'-deoxy-2'-fluoroguanosine-3'-phosphate
  modified_base 12: mod_base = OTHER; note = 2'-O-methyladenosine-3'-phosphate
  modified_base 13: mod_base = OTHER; note = 2'-O-methylcytidine-3'-phosphate
  modified_base 14: mod_base = OTHER; note = 2'-O-methylcytidine-3'-phosphate
  modified_base 15: mod_base = OTHER; note = 2'-O-methyladenosine-3'-phosphate
  modified_base 16: mod_base = OTHER; note = 2'-O-methylguanosine-3'-phosphate
  modified_base 17: mod_base = OTHER; note = 2'-O-methyluridine-3'-phosphate
  modified_base 18: mod_base = OTHER; note = 2'-O-methyluridine-3'-phosphate
  modified_base 19: mod_base = OTHER; note = 2'-O-methyladenosine-3'-phosphate
  modified_base 20: mod_base = OTHER; note = 2'-O-methyluridine-3'-phosphate
  modified_base 21: mod_base = OTHER; note = 2'-O-methyluridine-3'-phosphate ((2S,4R)-1-[29-[[2-(acetylamino)-2-deoxy-beta-D-galactopyra nosyl]oxy]-14,14-bis[[3-[[3-[[5-[[2-(acetylamino)-2-deoxy-b eta-D-galactopyranosyl]oxy]-1-oxopentyl]amino]propyl]amino] -3-oxopropoxy]methyl]-1,12,19,25-tetraoxo-16-oxa-13,20,24-t riazanonacos-1-yl]-4-hydroxy-2-pyrrolidinyl)methyl ester
cacagtacacgaccagttatt

SEQ ID NO: 289 - RNA, 21 nt, synthetic construct
  source 1..21: mol_type = other RNA
  modified_base 1: mod_base = OTHER; note = 2'-O-methylcytidine-3'-phosphorothioate
  modified_base 2: mod_base = OTHER; note = 2'-O-methyladenosine-3'-phosphorothioate
  modified_base 3: mod_base = OTHER; note = 2'-O-methylguanosine-3'-phosphate
  modified_base 4: mod_base = OTHER; note = 2'-O-methyladenosine-3'-phosphate
  modified_base 5: mod_base = OTHER; note = 2'-O-methylguanosine-3'-phosphate
  modified_base 6: mod_base = OTHER; note = 2'-O-methylcytidine-3'-phosphate
  modified_base 7: mod_base = OTHER; note = 2'-deoxy-2'-fluorouridine-3'-phosphate
  modified_base 8: mod_base = OTHER; note = 2'-O-methyladenosine-3'-phosphate
  modified_base 9: mod_base = OTHER; note = 2'-deoxy-2'-fluoroadenosine-3'-phosphate
  modified_base 10: mod_base = OTHER; note = 2'-deoxy-2'-fluorocytidine-3'-phosphate
  modified_base 11: mod_base = OTHER; note = 2'-deoxy-2'-fluoroadenosine-3'-phosphate
  modified_base 12: mod_base = OTHER; note = 2'-O-methylguanosine-3'-phosphate
  modified_base 13: mod_base = OTHER; note = 2'-O-methyladenosine-3'-phosphate
  modified_base 14: mod_base = OTHER; note = 2'-O-methyladenosine-3'-phosphate
  modified_base 15: mod_base = OTHER; note = 2'-O-methyladenosine-3'-phosphate
  modified_base 16: mod_base = OTHER; note = 2'-O-methylguanosine-3'-phosphate
  modified_base 17: mod_base = OTHER; note = 2'-O-methylcytidine-3'-phosphate
  modified_base 18: mod_base = OTHER; note = 2'-O-methyladenosine-3'-phosphate
  modified_base 19: mod_base = OTHER; note = 2'-O-methylguanosine-3'-phosphate
  modified_base 20: mod_base = OTHER; note = 2'-O-methyluridine-3'-phosphate
  modified_base 21: mod_base = OTHER; note = 2'-O-methyluridine-3'-phosphate ((2S,4R)-1-[29-[[2-(acetylamino)-2-deoxy-beta-D-galactopyra nosyl]oxy]-14,14-bis[[3-[[3-[[5-[[2-(acetylamino)-2-deoxy-b eta-D-galactopyranosyl]oxy]-1-oxopentyl]amino]propyl]amino] -3-oxopropoxy]methyl]-1,12,19,25-tetraoxo-16-oxa-13,20,24-t riazanonacos-1-yl]-4-hydroxy-2-pyrrolidinyl)methyl ester
cagagctaacagaaagcagtt

SEQ ID NO: 290 - RNA, 21 nt, synthetic construct
  source 1..21: mol_type = other RNA
  modified_base 1: mod_base = OTHER; note = 2'-O-methylcytidine-3'-phosphorothioate
  modified_base 2: mod_base = OTHER; note = 2'-O-methyladenosine-3'-phosphorothioate
  modified_base 3: mod_base = OTHER; note = 2'-O-methylguanosine-3'-phosphate
  modified_base 4: mod_base = OTHER; note = 2'-O-methyluridine-3'-phosphate
  modified_base 5: mod_base = OTHER; note = 2'-O-methylguanosine-3'-phosphate
  modified_base 6: mod_base = OTHER; note = 2'-O-methylguanosine-3'-phosphate
  modified_base 7: mod_base = OTHER; note = 2'-deoxy-2'-fluorocytidine-3'-phosphate
  modified_base 8: mod_base = OTHER; note = 2'-O-methyluridine-3'-phosphate
  modified_base 9: mod_base = OTHER; note = 2'-deoxy-2'-fluorocytidine-3'-phosphate
  modified_base 10: mod_base = OTHER; note = 2'-deoxy-2'-fluorouridine-3'-phosphate
  modified_base 11: mod_base = OTHER; note = 2'-deoxy-2'-fluoroguanosine-3'-phosphate
  modified_base 12: mod_base = OTHER; note = 2'-O-methylcytidine-3'-phosphate
  modified_base 13: mod_base = OTHER; note = 2'-O-methyladenosine-3'-phosphate
  modified_base 14: mod_base = OTHER; note = 2'-O-methyluridine-3'-phosphate
  modified_base 15: mod_base = OTHER; note = 2'-O-methylcytidine-3'-phosphate
  modified_base 16: mod_base = OTHER; note = 2'-O-methyladenosine-3'-phosphate
  modified_base 17: mod_base = OTHER; note = 2'-O-methylcytidine-3'-phosphate
  modified_base 18: mod_base = OTHER; note = 2'-O-methyladenosine-3'-phosphate
  modified_base 19: mod_base = OTHER; note = 2'-O-methylcytidine-3'-phosphate
  modified_base 20: mod_base = OTHER; note = 2'-O-methyladenosine-3'-phosphate
  modified_base 21: mod_base = OTHER; note = 2'-O-methyluridine-3'-phosphate ((2S,4R)-1-[29-[[2-(acetylamino)-2-deoxy-beta-D-galactopyra nosyl]oxy]-14,14-bis[[3-[[3-[[5-[[2-(acetylamino)-2-deoxy-b eta-D-galactopyranosyl]oxy]-1-oxopentyl]amino]propyl]amino] -3-oxopropoxy]methyl]-1,12,19,25-tetraoxo-16-oxa-13,20,24-t riazanonacos-1-yl]-4-hydroxy-2-pyrrolidinyl)methyl ester
cagtggctctgcatcacacat

SEQ ID NO: 291 - RNA, 21 nt, synthetic construct
  source 1..21: mol_type = other RNA
  modified_base 1: mod_base = OTHER; note = 2'-O-methyladenosine-3'-phosphorothioate
  modified_base 2: mod_base = OTHER; note = 2'-O-methyluridine-3'-phosphorothioate
  modified_base 3: mod_base = OTHER; note = 2'-O-methylcytidine-3'-phosphate
  modified_base 4: mod_base = OTHER; note = 2'-O-methyladenosine-3'-phosphate
  modified_base 5: mod_base = OTHER; note = 2'-O-methylcytidine-3'-phosphate
  modified_base 6: mod_base = OTHER; note = 2'-O-methyladenosine-3'-phosphate
  modified_base 7: mod_base = OTHER; note = 2'-deoxy-2'-fluorocytidine-3'-phosphate
  modified_base 8: mod_base = OTHER; note = 2'-O-methyladenosine-3'-phosphate
  modified_base 9: mod_base = OTHER; note = 2'-deoxy-2'-fluorouridine-3'-phosphate
  modified_base 10: mod_base = OTHER; note = 2'-deoxy-2'-fluoroadenosine-3'-phosphate
  modified_base 11: mod_base = OTHER; note = 2'-deoxy-2'-fluoroguanosine-3'-phosphate
  modified_base 12: mod_base = OTHER; note = 2'-O-methyladenosine-3'-phosphate
  modified_base 13: mod_base = OTHER; note = 2'-O-methylcytidine-3'-phosphate
  modified_base 14: mod_base = OTHER; note = 2'-O-methyluridine-3'-phosphate
  modified_base 15: mod_base = OTHER; note = 2'-O-methylguanosine-3'-phosphate
  modified_base 16: mod_base = OTHER; note = 2'-O-methylcytidine-3'-phosphate
  modified_base 17: mod_base = OTHER; note = 2'-O-methyladenosine-3'-phosphate
  modified_base 18: mod_base = OTHER; note = 2'-O-methylguanosine-3'-phosphate
  modified_base 19: mod_base = OTHER; note = 2'-O-methyladenosine-3'-phosphate
  modified_base 20: mod_base = OTHER; note = 2'-O-methyladenosine-3'-phosphate
  modified_base 21: mod_base = OTHER; note = 2'-O-methyluridine-3'-phosphate ((2S,4R)-1-[29-[[2-(acetylamino)-2-deoxy-beta-D-galactopyra nosyl]oxy]-14,14-bis[[3-[[3-[[5-[[2-(acetylamino)-2-deoxy-b eta-D-galactopyranosyl]oxy]-1-oxopentyl]amino]propyl]amino] -3-oxopropoxy]methyl]-1,12,19,25-tetraoxo-16-oxa-13,20,24-t riazanonacos-1-yl]-4-hydroxy-2-pyrrolidinyl)methyl ester
atcacacatagactgcagaat

SEQ ID NO: 292 - RNA, 21 nt, synthetic construct
  source 1..21: mol_type = other RNA
  modified_base 1: mod_base = OTHER; note = 2'-O-methylguanosine-3'-phosphorothioate
  modified_base 2: mod_base = OTHER; note = 2'-O-methyluridine-3'-phosphorothioate
  modified_base 3: mod_base = OTHER; note = 2'-O-methylguanosine-3'-phosphate
  modified_base 4: mod_base = OTHER; note = 2'-O-methyladenosine-3'-phosphate
  modified_base 5: mod_base = OTHER; note = 2'-O-methyladenosine-3'-phosphate
  modified_base 6: mod_base = OTHER; note = 2'-O-methyluridine-3'-phosphate
  modified_base 7: mod_base = OTHER; note = 2'-deoxy-2'-fluoroguanosine-3'-phosphate
  modified_base 8: mod_base = OTHER; note = 2'-O-methylguanosine-3'-phosphate
  modified_base 9: mod_base = OTHER; note = 2'-deoxy-2'-fluorouridine-3'-phosphate
  modified_base 10: mod_base = OTHER; note = 2'-deoxy-2'-fluorocytidine-3'-phosphate
  modified_base 11: mod_base = OTHER; note = 2'-deoxy-2'-fluoroadenosine-3'-phosphate
  modified_base 12: mod_base = OTHER; note = 2'-O-methylcytidine-3'-phosphate
  modified_base 13: mod_base = OTHER; note = 2'-O-methyladenosine-3'-phosphate
  modified_base 14: mod_base = OTHER; note = 2'-O-methyladenosine-3'-phosphate
  modified_base 15: mod_base = OTHER; note = 2'-O-methyluridine-3'-phosphate
  modified_base 16: mod_base = OTHER; note = 2'-O-methylguanosine-3'-phosphate
  modified_base 17: mod_base = OTHER; note = 2'-O-methylcytidine-3'-phosphate
  modified_base 18: mod_base = OTHER; note = 2'-O-methylguanosine-3'-phosphate
  modified_base 19: mod_base = OTHER; note = 2'-O-methyladenosine-3'-phosphate
  modified_base 20: mod_base = OTHER; note = 2'-O-methyluridine-3'-phosphate
  modified_base 21: mod_base = OTHER; note = 2'-O-methyluridine-3'-phosphate ((2S,4R)-1-[29-[[2-(acetylamino)-2-deoxy-beta-D-galactopyra nosyl]oxy]-14,14-bis[[3-[[3-[[5-[[2-(acetylamino)-2-deoxy-b eta-D-galactopyranosyl]oxy]-1-oxopentyl]amino]propyl]amino] -3-oxopropoxy]methyl]-1,12,19,25-tetraoxo-16-oxa-13,20,24-t riazanonacos-1-yl]-4-hydroxy-2-pyrrolidinyl)methyl ester
gtgaatggtcacaatgcgatt

SEQ ID NO: 293 - RNA, 21 nt, synthetic construct
  source 1..21: mol_type = other RNA
  modified_base 1: mod_base = OTHER; note = 2'-O-methyluridine-3'-phosphorothioate
  modified_base 2: mod_base = OTHER; note = 2'-O-methylguanosine-3'-phosphorothioate
  modified_base 3: mod_base = OTHER; note = 2'-O-methylcytidine-3'-phosphate
  modified_base 4: mod_base = OTHER; note = 2'-O-methylguanosine-3'-phosphate
  modified_base 5: mod_base = OTHER; note = 2'-O-methyladenosine-3'-phosphate
  modified_base 6: mod_base = OTHER; note = 2'-O-methyluridine-3'-phosphate
  modified_base 7: mod_base = OTHER; note = 2'-deoxy-2'-fluorocytidine-3'-phosphate
  modified_base 8: mod_base = OTHER; note = 2'-O-methylcytidine-3'-phosphate
  modified_base 9: mod_base = OTHER; note = 2'-deoxy-2'-fluorouridine-3'-phosphate
  modified_base 10: mod_base = OTHER; note = 2'-deoxy-2'-fluorouridine-3'-phosphate
  modified_base 11: mod_base = OTHER; note = 2'-deoxy-2'-fluoroguanosine-3'-phosphate
  modified_base 12: mod_base = OTHER; note = 2'-O-methyluridine-3'-phosphate
  modified_base 13: mod_base = OTHER; note = 2'-O-methylcytidine-3'-phosphate
  modified_base 14: mod_base = OTHER; note = 2'-O-methyluridine-3'-phosphate
  modified_base 15: mod_base = OTHER; note = 2'-O-methylcytidine-3'-phosphate
  modified_base 16: mod_base = OTHER; note = 2'-O-methyladenosine-3'-phosphate
  modified_base 17: mod_base = OTHER; note = 2'-O-methylguanosine-3'-phosphate
  modified_base 18: mod_base = OTHER; note = 2'-O-methyladenosine-3'-phosphate
  modified_base 19: mod_base = OTHER; note = 2'-O-methylcytidine-3'-phosphate
  modified_base 20: mod_base = OTHER; note = 2'-O-methyladenosine-3'-phosphate
  modified_base 21: mod_base = OTHER; note = 2'-O-methyluridine-3'-phosphate ((2S,4R)-1-[29-[[2-(acetylamino)-2-deoxy-beta-D-galactopyra nosyl]oxy]-14,14-bis[[3-[[3-[[5-[[2-(acetylamino)-2-deoxy-b eta-D-galactopyranosyl]oxy]-1-oxopentyl]amino]propyl]amino] -3-oxopropoxy]methyl]-1,12,19,25-tetraoxo-16-oxa-13,20,24-t riazanonacos-1-yl]-4-hydroxy-2-pyrrolidinyl)methyl ester
tgcgatccttgtctcagacat

SEQ ID NO: 294 - RNA, 21 nt, synthetic construct
  source 1..21: mol_type = other RNA
  modified_base 1: mod_base = OTHER; note = 2'-O-methyluridine-3'-phosphorothioate
  modified_base 2: mod_base = OTHER; note = 2'-O-methylcytidine-3'-phosphorothioate
  modified_base 3: mod_base = OTHER; note = 2'-O-methyladenosine-3'-phosphate
  modified_base 4: mod_base = OTHER; note = 2'-O-methylguanosine-3'-phosphate
  modified_base 5: mod_base = OTHER; note = 2'-O-methyladenosine-3'-phosphate
  modified_base 6: mod_base = OTHER; note = 2'-O-methylcytidine-3'-phosphate
  modified_base 7: mod_base = OTHER; note = 2'-deoxy-2'-fluoroadenosine-3'-phosphate
  modified_base 8: mod_base = OTHER; note = 2'-O-methyladenosine-3'-phosphate
  modified_base 9: mod_base = OTHER; note = 2'-deoxy-2'-fluoroadenosine-3'-phosphate
  modified_base 10: mod_base = OTHER; note = 2'-deoxy-2'-fluorouridine-3'-phosphate
  modified_base 11: mod_base = OTHER; note = 2'-deoxy-2'-fluoroguanosine-3'-phosphate
  modified_base 12: mod_base = OTHER; note = 2'-O-methyluridine-3'-phosphate
  modified_base 13: mod_base = OTHER; note = 2'-O-methyluridine-3'-phosphate
  modified_base 14: mod_base = OTHER; note = 2'-O-methyluridine-3'-phosphate
  modified_base 15: mod_base = OTHER; note = 2'-O-methylcytidine-3'-phosphate
  modified_base 16: mod_base = OTHER; note = 2'-O-methylguanosine-3'-phosphate
  modified_base 17: mod_base = OTHER; note = 2'-O-methyluridine-3'-phosphate
  modified_base 18: mod_base = OTHER; note = 2'-O-methyluridine-3'-phosphate
  modified_base 19: mod_base = OTHER; note = 2'-O-methylcytidine-3'-phosphate
  modified_base 20: mod_base = OTHER; note = 2'-O-methyladenosine-3'-phosphate
  modified_base 21: mod_base = OTHER; note = 2'-O-methyluridine-3'-phosphate ((2S,4R)-1-[29-[[2-(acetylamino)-2-deoxy-beta-D-galactopyra nosyl]oxy]-14,14-bis[[3-[[3-[[5-[[2-(acetylamino)-2-deoxy-b eta-D-galactopyranosyl]oxy]-1-oxopentyl]amino]propyl]amino] -3-oxopropoxy]methyl]-1,12,19,25-tetraoxo-16-oxa-13,20,24-t riazanonacos-1-yl]-4-hydroxy-2-pyrrolidinyl)methyl ester
tcagacaaatgtttcgttcat

SEQ ID NO: 295 - RNA, 21 nt, synthetic construct
  source 1..21: mol_type = other RNA
  modified_base 1: mod_base = OTHER; note = 2'-O-methylcytidine-3'-phosphorothioate
  modified_base 2: mod_base = OTHER; note = 2'-O-methyladenosine-3'-phosphorothioate
  modified_base 3: mod_base = OTHER; note = 2'-O-methyladenosine-3'-phosphate
  modified_base 4: mod_base = OTHER; note = 2'-O-methylguanosine-3'-phosphate
  modified_base 5: mod_base = OTHER; note = 2'-O-methyladenosine-3'-phosphate
  modified_base 6: mod_base = OTHER; note = 2'-O-methyladenosine-3'-phosphate
  modified_base 7: mod_base = OTHER; note = 2'-deoxy-2'-fluoroguanosine-3'-phosphate
  modified_base 8: mod_base = OTHER; note = 2'-O-methylcytidine-3'-phosphate
  modified_base 9: mod_base = OTHER; note = 2'-deoxy-2'-fluoroadenosine-3'-phosphate
  modified_base 10: mod_base = OTHER; note = 2'-deoxy-2'-fluorouridine-3'-phosphate
  modified_base 11: mod_base = OTHER; note = 2'-deoxy-2'-fluorouridine-3'-phosphate
  modified_base 12: mod_base = OTHER; note = 2'-O-methylguanosine-3'-phosphate
  modified_base 13: mod_base = OTHER; note = 2'-O-methyladenosine-3'-phosphate
  modified_base 14: mod_base = OTHER; note = 2'-O-methylguanosine-3'-phosphate
  modified_base 15: mod_base = OTHER; note = 2'-O-methylguanosine-3'-phosphate
  modified_base 16: mod_base = OTHER; note = 2'-O-methyluridine-3'-phosphate
  modified_base 17: mod_base = OTHER; note = 2'-O-methylcytidine-3'-phosphate
  modified_base 18: mod_base = OTHER; note = 2'-O-methyluridine-3'-phosphate
  modified_base 19: mod_base = OTHER; note = 2'-O-methyluridine-3'-phosphate
  modified_base 20: mod_base = OTHER; note = 2'-O-methyluridine-3'-phosphate
  modified_base 21: mod_base = OTHER; note = 2'-O-methyluridine-3'-phosphate ((2S,4R)-1-[29-[[2-(acetylamino)-2-deoxy-beta-D-galactopyra nosyl]oxy]-14,14-bis[[3-[[3-[[5-[[2-(acetylamino)-2-deoxy-b eta-D-galactopyranosyl]oxy]-1-oxopentyl]amino]propyl]amino] -3-oxopropoxy]methyl]-1,12,19,25-tetraoxo-16-oxa-13,20,24-t riazanonacos-1-yl]-4-hydroxy-2-pyrrolidinyl)methyl ester
caagaagcattgaggtctttt

SEQ ID NO: 296 - RNA, 21 nt, synthetic construct
  source 1..21: mol_type = other RNA
  modified_base 1: mod_base = OTHER; note = 2'-O-methyluridine-3'-phosphorothioate
  modified_base 2: mod_base = OTHER; note = 2'-O-methylguanosine-3'-phosphorothioate
  modified_base 3: mod_base = OTHER; note = 2'-O-methylguanosine-3'-phosphate
  modified_base 4: mod_base = OTHER; note = 2'-O-methyladenosine-3'-phosphate
  modified_base 5: mod_base = OTHER; note = 2'-O-methylcytidine-3'-phosphate
  modified_base 6: mod_base = OTHER; note = 2'-O-methyladenosine-3'-phosphate
  modified_base 7: mod_base = OTHER; note = 2'-deoxy-2'-fluoroadenosine-3'-phosphate
  modified_base 8: mod_base = OTHER; note = 2'-O-methyluridine-3'-phosphate
  modified_base 9: mod_base = OTHER; note = 2'-deoxy-2'-fluorouridine-3'-phosphate
  modified_base 10: mod_base = OTHER; note = 2'-deoxy-2'-fluorouridine-3'-phosphate
  modified_base 11: mod_base = OTHER; note = 2'-deoxy-2'-fluoroadenosine-3'-phosphate
  modified_base 12: mod_base = OTHER; note = 2'-O-methyladenosine-3'-phosphate
  modified_base 13: mod_base = OTHER; note = 2'-O-methyluridine-3'-phosphate
  modified_base 14: mod_base = OTHER; note = 2'-O-methylguanosine-3'-phosphate
  modified_base 15: mod_base = OTHER; note = 2'-O-methylguanosine-3'-phosphate
  modified_base 16: mod_base = OTHER; note = 2'-O-methylguanosine-3'-phosphate
  modified_base 17: mod_base = OTHER; note = 2'-O-methyladenosine-3'-phosphate
  modified_base 18: mod_base = OTHER; note = 2'-O-methyladenosine-3'-phosphate
  modified_base 19: mod_base = OTHER; note = 2'-O-methyladenosine-3'-phosphate
  modified_base 20: mod_base = OTHER; note = 2'-O-methyladenosine-3'-phosphate
  modified_base 21: mod_base = OTHER; note = 2'-O-methyluridine-3'-phosphate ((2S,4R)-1-[29-[[2-(acetylamino)-2-deoxy-beta-D-galactopyra nosyl]oxy]-14,14-bis[[3-[[3-[[5-[[2-(acetylamino)-2-deoxy-b eta-D-galactopyranosyl]oxy]-1-oxopentyl]amino]propyl]amino] -3-oxopropoxy]methyl]-1,12,19,25-tetraoxo-16-oxa-13,20,24-t riazanonacos-1-yl]-4-hydroxy-2-pyrrolidinyl)methyl ester
tggacaatttaatgggaaaat

SEQ ID NO: 297 - RNA, 21 nt, synthetic construct
  source 1..21: mol_type = other RNA
  modified_base 1: mod_base = OTHER; note = 2'-O-methylguanosine-3'-phosphorothioate
  modified_base 2: mod_base = OTHER; note = 2'-O-methylguanosine-3'-phosphorothioate
  modified_base 3: mod_base = OTHER; note = 2'-O-methyladenosine-3'-phosphate
  modified_base 4: mod_base = OTHER; note = 2'-O-methylguanosine-3'-phosphate
  modified_base 5: mod_base = OTHER; note = 2'-O-methyladenosine-3'-phosphate
  modified_base 6: mod_base = OTHER; note = 2'-O-methylcytidine-3'-phosphate
  modified_base 7: mod_base = OTHER; note = 2'-deoxy-2'-fluoroadenosine-3'-phosphate
  modified_base 8: mod_base = OTHER; note = 2'-O-methylguanosine-3'-phosphate
  modified_base 9: mod_base = OTHER; note = 2'-deoxy-2'-fluoroadenosine-3'-phosphate
  modified_base 10: mod_base = OTHER; note = 2'-deoxy-2'-fluorocytidine-3'-phosphate
  modified_base 11: mod_base = OTHER; note = 2'-deoxy-2'-fluoroguanosine-3'-phosphate
  modified_base 12: mod_base = OTHER; note = 2'-O-methyladenosine-3'-phosphate
  modified_base 13: mod_base = OTHER; note = 2'-O-methylcytidine-3'-phosphate
  modified_base 14: mod_base = OTHER; note = 2'-O-methyladenosine-3'-phosphate
  modified_base 15: mod_base = OTHER; note = 2'-O-methylguanosine-3'-phosphate
  modified_base 16: mod_base = OTHER; note = 2'-O-methyluridine-3'-phosphate
  modified_base 17: mod_base = OTHER; note = 2'-O-methylguanosine-3'-phosphate
  modified_base 18: mod_base = OTHER; note = 2'-O-methyluridine-3'-phosphate
  modified_base 19: mod_base = OTHER; note = 2'-O-methylguanosine-3'-phosphate
  modified_base 20: mod_base = OTHER; note = 2'-O-methyluridine-3'-phosphate
  modified_base 21: mod_base = OTHER; note = 2'-O-methyluridine-3'-phosphate ((2S,4R)-1-[29-[[2-(acetylamino)-2-deoxy-beta-D-galactopyra nosyl]oxy]-14,14-bis[[3-[[3-[[5-[[2-(acetylamino)-2-deoxy-b eta-D-galactopyranosyl]oxy]-1-oxopentyl]amino]propyl]amino] -3-oxopropoxy]methyl]-1,12,19,25-tetraoxo-16-oxa-13,20,24-t riazanonacos-1-yl]-4-hydroxy-2-pyrrolidinyl)methyl ester
ggagacagacgacagtgtgtt

SEQ ID NO: 298 - RNA, 21 nt, synthetic construct
  source 1..21: mol_type = other RNA
  modified_base 1: mod_base = OTHER; note = 2'-O-methylcytidine-3'-phosphorothioate
  modified_base 2: mod_base = OTHER; note = 2'-O-methyluridine-3'-phosphorothioate
  modified_base 3: mod_base = OTHER; note = 2'-O-methylguanosine-3'-phosphate
  modified_base 4: mod_base = OTHER; note = 2'-O-methylcytidine-3'-phosphate
  modified_base 5: mod_base = OTHER; note = 2'-O-methylguanosine-3'-phosphate
  modified_base 6: mod_base = OTHER; note = 2'-O-methylguanosine-3'-phosphate
  modified_base 7: mod_base = OTHER; note = 2'-deoxy-2'-fluoroadenosine-3'-phosphate
  modified_base 8: mod_base = OTHER; note = 2'-O-methyladenosine-3'-phosphate
  modified_base 9: mod_base = OTHER; note = 2'-deoxy-2'-fluoroadenosine-3'-phosphate
  modified_base 10: mod_base = OTHER; note = 2'-deoxy-2'-fluorouridine-3'-phosphate
  modified_base 11: mod_base = OTHER; note = 2'-deoxy-2'-fluoroguanosine-3'-phosphate
  modified_base 12: mod_base = OTHER; note = 2'-O-methyladenosine-3'-phosphate
  modified_base 13: mod_base = OTHER; note = 2'-O-methylcytidine-3'-phosphate
  modified_base 14: mod_base = OTHER; note = 2'-O-methyluridine-3'-phosphate
  modified_base 15: mod_base = OTHER; note = 2'-O-methyluridine-3'-phosphate
  modified_base 16: mod_base = OTHER; note = 2'-O-methyluridine-3'-phosphate
  modified_base 17: mod_base = OTHER; note = 2'-O-methylcytidine-3'-phosphate
  modified_base 18: mod_base = OTHER; note = 2'-O-methyladenosine-3'-phosphate
  modified_base 19: mod_base = OTHER; note = 2'-O-methyladenosine-3'-phosphate
  modified_base 20: mod_base = OTHER; note = 2'-O-methyluridine-3'-phosphate
  modified_base 21: mod_base = OTHER; note = 2'-O-methyluridine-3'-phosphate ((2S,4R)-1-[29-[[2-(acetylamino)-2-deoxy-beta-D-galactopyra nosyl]oxy]-14,14-bis[[3-[[3-[[5-[[2-(acetylamino)-2-deoxy-b eta-D-galactopyranosyl]oxy]-1-oxopentyl]amino]propyl]amino] -3-oxopropoxy]methyl]-1,12,19,25-tetraoxo-16-oxa-13,20,24-t riazanonacos-1-yl]-4-hydroxy-2-pyrrolidinyl)methyl ester
ctgcggaaatgactttcaatt

SEQ ID NO: 299 - RNA, 21 nt, synthetic construct
  source 1..21: mol_type = other RNA
  modified_base 1: mod_base = OTHER; note = 2'-O-methylcytidine-3'-phosphorothioate
  modified_base 2: mod_base = OTHER; note = 2'-O-methyluridine-3'-phosphorothioate
  modified_base 3: mod_base = OTHER; note = 2'-O-methyluridine-3'-phosphate
  modified_base 4: mod_base = OTHER; note = 2'-O-methyluridine-3'-phosphate
  modified_base 5: mod_base = OTHER; note = 2'-O-methylcytidine-3'-phosphate
  modified_base 6: mod_base = OTHER; note = 2'-O-methyladenosine-3'-phosphate
  modified_base 7: mod_base = OTHER; note = 2'-deoxy-2'-fluoroadenosine-3'-phosphate
  modified_base 8: mod_base = OTHER; note = 2'-O-methyluridine-3'-phosphate
  modified_base 9: mod_base = OTHER; note = 2'-deoxy-2'-fluoroguanosine-3'-phosphate
  modified_base 10: mod_base = OTHER; note = 2'-deoxy-2'-fluorocytidine-3'-phosphate
  modified_base 11: mod_base = OTHER; note = 2'-deoxy-2'-fluoroadenosine-3'-phosphate
  modified_base 12: mod_base = OTHER; note = 2'-O-methylguanosine-3'-phosphate
  modified_base 13: mod_base = OTHER; note = 2'-O-methyluridine-3'-phosphate
  modified_base 14: mod_base = OTHER; note = 2'-O-methyladenosine-3'-phosphate
  modified_base 15: mod_base = OTHER; note = 2'-O-methylcytidine-3'-phosphate
  modified_base 16: mod_base = OTHER; note = 2'-O-methyladenosine-3'-phosphate
  modified_base 17: mod_base = OTHER; note = 2'-O-methylguanosine-3'-phosphate
  modified_base 18: mod_base = OTHER; note = 2'-O-methylguanosine-3'-phosphate
  modified_base 19: mod_base = OTHER; note = 2'-O-methylcytidine-3'-phosphate
  modified_base 20: mod_base = OTHER; note = 2'-O-methyladenosine-3'-phosphate
  modified_base 21: mod_base = OTHER; note = 2'-O-methyluridine-3'-phosphate ((2S,4R)-1-[29-[[2-(acetylamino)-2-deoxy-beta-D-galactopyra nosyl]oxy]-14,14-bis[[3-[[3-[[5-[[2-(acetylamino)-2-deoxy-b eta-D-galactopyranosyl]oxy]-1-oxopentyl]amino]propyl]amino] -3-oxopropoxy]methyl]-1,12,19,25-tetraoxo-16-oxa-13,20,24-t riazanonacos-1-yl]-4-hydroxy-2-pyrrolidinyl)methyl ester
ctttcaatgcagtacaggcat

SEQ ID NO: 300 - RNA, 21 nt, synthetic construct
  source 1..21: mol_type = other RNA
  modified_base 1: mod_base = OTHER; note = 2'-O-methylguanosine-3'-phosphorothioate
  modified_base 2: mod_base = OTHER; note = 2'-O-methyladenosine-3'-phosphorothioate
  modified_base 3: mod_base = OTHER; note = 2'-O-methyluridine-3'-phosphate
  modified_base 4: mod_base = OTHER; note = 2'-O-methylguanosine-3'-phosphate
  modified_base 5: mod_base = OTHER; note = 2'-O-methylcytidine-3'-phosphate
  modified_base 6: mod_base = OTHER; note = 2'-O-methyladenosine-3'-phosphate
  modified_base 7: mod_base = OTHER; note = 2'-deoxy-2'-fluorouridine-3'-phosphate
  modified_base 8: mod_base = OTHER; note = 2'-O-methyladenosine-3'-phosphate
  modified_base 9: mod_base = OTHER; note = 2'-deoxy-2'-fluoroadenosine-3'-phosphate
  modified_base 10: mod_base = OTHER; note = 2'-deoxy-2'-fluoroadenosine-3'-phosphate
  modified_base 11: mod_base = OTHER; note = 2'-deoxy-2'-fluoroguanosine-3'-phosphate
  modified_base 12: mod_base = OTHER; note = 2'-O-methyladenosine-3'-phosphate
  modified_base 13: mod_base = OTHER; note = 2'-O-methyluridine-3'-phosphate
  modified_base 14: mod_base = OTHER; note = 2'-O-methylguanosine-3'-phosphate
  modified_base 15: mod_base = OTHER; note = 2'-O-methylcytidine-3'-phosphate
  modified_base 16: mod_base = OTHER; note = 2'-O-methylguanosine-3'-phosphate
  modified_base 17: mod_base = OTHER; note = 2'-O-methyladenosine-3'-phosphate
  modified_base 18: mod_base = OTHER; note = 2'-O-methylcytidine-3'-phosphate
  modified_base 19: mod_base = OTHER; note = 2'-O-methyluridine-3'-phosphate
  modified_base 20: mod_base = OTHER; note = 2'-O-methyluridine-3'-phosphate
  modified_base 21: mod_base = OTHER; note = 2'-O-methyluridine-3'-phosphate ((2S,4R)-1-[29-[[2-(acetylamino)-2-deoxy-beta-D-galactopyra nosyl]oxy]-14,14-bis[[3-[[3-[[5-[[2-(acetylamino)-2-deoxy-b eta-D-galactopyranosyl]oxy]-1-oxopentyl]amino]propyl]amino] -3-oxopropoxy]methyl]-1,12,19,25-tetraoxo-16-oxa-13,20,24-t riazanonacos-1-yl]-4-hydroxy-2-pyrrolidinyl)methyl ester
gatgcataaagatgcgacttt

SEQ ID NO: 301 - RNA, 21 nt, synthetic construct
  source 1..21: mol_type = other RNA
  modified_base 1: mod_base = OTHER; note = 2'-O-methyluridine-3'-phosphorothioate
  modified_base 2: mod_base = OTHER; note = 2'-O-methylguanosine-3'-phosphorothioate
  modified_base 3: mod_base = OTHER; note = 2'-O-methyluridine-3'-phosphate
  modified_base 4: mod_base = OTHER; note = 2'-O-methyladenosine-3'-phosphate
  modified_base 5: mod_base = OTHER; note = 2'-O-methyladenosine-3'-phosphate
  modified_base 6: mod_base = OTHER; note = 2'-O-methyluridine-3'-phosphate
  modified_base 7: mod_base = OTHER; note = 2'-deoxy-2'-fluoroguanosine-3'-phosphate
  modified_base 8: mod_base = OTHER; note = 2'-O-methylguanosine-3'-phosphate
  modified_base 9: mod_base = OTHER; note = 2'-deoxy-2'-fluorouridine-3'-phosphate
  modified_base 10: mod_base = OTHER; note = 2'-deoxy-2'-fluoroguanosine-3'-phosphate
  modified_base 11: mod_base = OTHER; note = 2'-deoxy-2'-fluoroadenosine-3'-phosphate
  modified_base 12: mod_base = OTHER; note = 2'-O-methylcytidine-3'-phosphate
  modified_base 13: mod_base = OTHER; note = 2'-O-methyladenosine-3'-phosphate
  modified_base 14: mod_base = OTHER; note = 2'-O-methyladenosine-3'-phosphate
  modified_base 15: mod_base = OTHER; note = 2'-O-methyluridine-3'-phosphate
  modified_base 16: mod_base = OTHER; note = 2'-O-methylguanosine-3'-phosphate
  modified_base 17: mod_base = OTHER; note = 2'-O-methyladenosine-3'-phosphate
  modified_base 18: mod_base = OTHER; note = 2'-O-methylcytidine-3'-phosphate
  modified_base 19: mod_base = OTHER; note = 2'-O-methyluridine-3'-phosphate
  modified_base 20: mod_base = OTHER; note = 2'-O-methylguanosine-3'-phosphate
  modified_base 21: mod_base = OTHER; note = 2'-O-methyluridine-3'-phosphate ((2S,4R)-1-[29-[[2-(acetylamino)-2-deoxy-beta-D-galactopyra nosyl]oxy]-14,14-bis[[3-[[3-[[5-[[2-(acetylamino)-2-deoxy-b eta-D-galactopyranosyl]oxy]-1-oxopentyl]amino]propyl]amino] -3-oxopropoxy]methyl]-1,12,19,25-tetraoxo-16-oxa-13,20,24-t riazanonacos-1-yl]-4-hydroxy-2-pyrrolidinyl)methyl ester
tgtaatggtgacaatgactgt

SEQ ID NO: 302 - RNA, 21 nt, synthetic construct
  source 1..21: mol_type = other RNA
  modified_base 1: mod_base = OTHER; note = 2'-O-methylguanosine-3'-phosphorothioate
  modified_base 2: mod_base = OTHER; note = 2'-O-methyladenosine-3'-phosphorothioate
  modified_base 3: mod_base = OTHER; note = 2'-O-methylguanosine-3'-phosphate
  modified_base 4: mod_base = OTHER; note = 2'-O-methyladenosine-3'-phosphate
  modified_base 5: mod_base = OTHER; note = 2'-O-methylcytidine-3'-phosphate
  modified_base 6: mod_base = OTHER; note = 2'-O-methyluridine-3'-phosphate
  modified_base 7: mod_base = OTHER; note = 2'-deoxy-2'-fluorouridine-3'-phosphate
  modified_base 8: mod_base = OTHER; note = 2'-O-methyluridine-3'-phosphate
  modified_base 9: mod_base = OTHER; note = 2'-deoxy-2'-fluorouridine-3'-phosphate
  modified_base 10: mod_base = OTHER; note = 2'-deoxy-2'-fluorocytidine-3'-phosphate
  modified_base 11: mod_base = OTHER; note = 2'-deoxy-2'-fluoroadenosine-3'-phosphate
  modified_base 12: mod_base = OTHER; note = 2'-O-methylguanosine-3'-phosphate
  modified_base 13: mod_base = OTHER; note = 2'-O-methyladenosine-3'-phosphate
  modified_base 14: mod_base = OTHER; note = 2'-O-methyluridine-3'-phosphate
  modified_base 15: mod_base = OTHER; note = 2'-O-methylguanosine-3'-phosphate
  modified_base 16: mod_base = OTHER; note = 2'-O-methyladenosine-3'-phosphate
  modified_base 17: mod_base = OTHER; note = 2'-O-methylguanosine-3'-phosphate
  modified_base 18: mod_base = OTHER; note = 2'-O-methylguanosine-3'-phosphate
  modified_base 19: mod_base = OTHER; note = 2'-O-methyladenosine-3'-phosphate
  modified_base 20: mod_base = OTHER; note = 2'-O-methyluridine-3'-phosphate
  modified_base 21: mod_base = OTHER; note = 2'-O-methyluridine-3'-phosphate ((2S,4R)-1-[29-[[2-(acetylamino)-2-deoxy-beta-D-galactopyra nosyl]oxy]-14,14-bis[[3-[[3-[[5-[[2-(acetylamino)-2-deoxy-b eta-D-galactopyranosyl]oxy]-1-oxopentyl]amino]propyl]amino] -3-oxopropoxy]methyl]-1,12,19,25-tetraoxo-16-oxa-13,20,24-t riazanonacos-1-yl]-4-hydroxy-2-pyrrolidinyl)methyl ester
gagacttttcagatgaggatt

SEQ ID NO: 303 - RNA, 21 nt, synthetic construct
  source 1..21: mol_type = other RNA
  modified_base 1: mod_base = OTHER; note = 2'-O-methylguanosine-3'-phosphorothioate
  modified_base 2: mod_base = OTHER; note = 2'-O-methyladenosine-3'-phosphorothioate
  modified_base 3: mod_base = OTHER; note = 2'-O-methylguanosine-3'-phosphate
  modified_base 4: mod_base = OTHER; note = 2'-O-methylguanosine-3'-phosphate
  modified_base 5: mod_base = OTHER; note = 2'-O-methyladenosine-3'-phosphate
  modified_base 6: mod_base = OTHER; note = 2'-O-methyluridine-3'-phosphate
  modified_base 7: mod_base = OTHER; note = 2'-deoxy-2'-fluoroguanosine-3'-phosphate
  modified_base 8: mod_base = OTHER; note = 2'-O-methyladenosine-3'-phosphate
  modified_base 9: mod_base = OTHER; note = 2'-deoxy-2'-fluorouridine-3'-phosphate
  modified_base 10: mod_base = OTHER; note = 2'-deoxy-2'-fluorouridine-3'-phosphate
  modified_base 11: mod_base = OTHER; note = 2'-deoxy-2'-fluoroguanosine-3'-phosphate
  modified_base 12: mod_base = OTHER; note = 2'-O-methyluridine-3'-phosphate
  modified_base 13: mod_base = OTHER; note = 2'-O-methylguanosine-3'-phosphate
  modified_base 14: mod_base = OTHER; note = 2'-O-methyladenosine-3'-phosphate
  modified_base 15: mod_base = OTHER; note = 2'-O-methyladenosine-3'-phosphate
  modified_base 16: mod_base = OTHER; note = 2'-O-methyladenosine-3'-phosphate
  modified_base 17: mod_base = OTHER; note = 2'-O-methylguanosine-3'-phosphate
  modified_base 18: mod_base = OTHER; note = 2'-O-methyluridine-3'-phosphate
  modified_base 19: mod_base = OTHER; note = 2'-O-methylguanosine-3'-phosphate
  modified_base 20: mod_base = OTHER; note = 2'-O-methyladenosine-3'-phosphate
  modified_base 21: mod_base = OTHER; note = 2'-O-methyluridine-3'-phosphate ((2S,4R)-1-[29-[[2-(acetylamino)-2-deoxy-beta-D-galactopyra nosyl]oxy]-14,14-bis[[3-[[3-[[5-[[2-(acetylamino)-2-deoxy-b eta-D-galactopyranosyl]oxy]-1-oxopentyl]amino]propyl]amino] -3-oxopropoxy]methyl]-1,12,19,25-tetraoxo-16-oxa-13,20,24-t riazanonacos-1-yl]-4-hydroxy-2-pyrrolidinyl)methyl ester
gaggatgattgtgaaagtgat

SEQ ID NO: 304 - RNA, 21 nt, synthetic construct
  source 1..21: mol_type = other RNA
  modified_base 1: mod_base = OTHER; note = 2'-O-methylcytidine-3'-phosphorothioate
  modified_base 2: mod_base = OTHER; note = 2'-O-methyluridine-3'-phosphorothioate
  modified_base 3: mod_base = OTHER; note = 2'-O-methylguanosine-3'-phosphate
  modified_base 4: mod_base = OTHER; note = 2'-O-methylcytidine-3'-phosphate
  modified_base 5: mod_base = OTHER; note = 2'-O-methyladenosine-3'-phosphate
  modified_base 6: mod_base = OTHER; note = 2'-O-methylguanosine-3'-phosphate
  modified_base 7: mod_base = OTHER; note = 2'-deoxy-2'-fluoroadenosine-3'-phosphate
  modified_base 8: mod_base = OTHER; note = 2'-O-methylguanosine-3'-phosphate
  modified_base 9: mod_base = OTHER; note = 2'-deoxy-2'-fluoroadenosine-3'-phosphate
  modified_base 10: mod_base = OTHER; note = 2'-deoxy-2'-fluorocytidine-3'-phosphate
  modified_base 11: mod_base = OTHER; note = 2'-deoxy-2'-fluoroadenosine-3'-phosphate
  modified_base 12: mod_base = OTHER; note = 2'-O-methylguanosine-3'-phosphate
  modified_base 13: mod_base = OTHER; note = 2'-O-methyladenosine-3'-phosphate
  modified_base 14: mod_base = OTHER; note = 2'-O-methylguanosine-3'-phosphate
  modified_base 15: mod_base = OTHER; note = 2'-O-methyluridine-3'-phosphate
  modified_base 16: mod_base = OTHER; note = 2'-O-methylguanosine-3'-phosphate
  modified_base 17: mod_base = OTHER; note = 2'-O-methylguanosine-3'-phosphate
  modified_base 18: mod_base = OTHER; note = 2'-O-methyluridine-3'-phosphate
  modified_base 19: mod_base = OTHER; note = 2'-O-methyladenosine-3'-phosphate
  modified_base 20: mod_base = OTHER; note = 2'-O-methylguanosine-3'-phosphate
  modified_base 21: mod_base = OTHER; note = 2'-O-methyluridine-3'-phosphate ((2S,4R)-1-[29-[[2-(acetylamino)-2-deoxy-beta-D-galactopyra nosyl]oxy]-14,14-bis[[3-[[3-[[5-[[2-(acetylamino)-2-deoxy-b eta-D-galactopyranosyl]oxy]-1-oxopentyl]amino]propyl]amino] -3-oxopropoxy]methyl]-1,12,19,25-tetraoxo-16-oxa-13,20,24-t riazanonacos-1-yl]-4-hydroxy-2-pyrrolidinyl)methyl ester
ctgcagagacagagtggtagt

SEQ ID NO: 305 - RNA, 21 nt, synthetic construct
  source 1..21: mol_type = other RNA
  modified_base 1: mod_base = OTHER; note = 2'-O-methylguanosine-3'-phosphorothioate
  modified_base 2: mod_base = OTHER; note = 2'-O-methyluridine-3'-phosphorothioate
  modified_base 3: mod_base = OTHER; note = 2'-O-methylguanosine-3'-phosphate
  modified_base 4: mod_base = OTHER; note = 2'-O-methylguanosine-3'-phosphate
  modified_base 5: mod_base = OTHER; note = 2'-O-methyluridine-3'-phosphate
  modified_base 6: mod_base = OTHER; note = 2'-O-methyladenosine-3'-phosphate
  modified_base 7: mod_base = OTHER; note = 2'-deoxy-2'-fluoroguanosine-3'-phosphate
  modified_base 8: mod_base = OTHER; note = 2'-O-methyladenosine-3'-phosphate
  modified_base 9: mod_base = OTHER; note = 2'-deoxy-2'-fluoroadenosine-3'-phosphate
  modified_base 10: mod_base = OTHER; note = 2'-deoxy-2'-fluoroguanosine-3'-phosphate
  modified_base 11: mod_base = OTHER; note = 2'-deoxy-2'-fluoroadenosine-3'-phosphate
  modified_base 12: mod_base = OTHER; note = 2'-O-methylguanosine-3'-phosphate
  modified_base 13: mod_base = OTHER; note = 2'-O-methyluridine-3'-phosphate
  modified_base 14: mod_base = OTHER; note = 2'-O-methylcytidine-3'-phosphate
  modified_base 15: mod_base = OTHER; note = 2'-O-methyluridine-3'-phosphate
  modified_base 16: mod_base = OTHER; note = 2'-O-methylguanosine-3'-phosphate
  modified_base 17: mod_base = OTHER; note = 2'-O-methyladenosine-3'-phosphate
  modified_base 18: mod_base = OTHER; note = 2'-O-methylguanosine-3'-phosphate
  modified_base 19: mod_base = OTHER; note = 2'-O-methylcytidine-3'-phosphate
  modified_base 20: mod_base = OTHER; note = 2'-O-methyluridine-3'-phosphate
  modified_base 21: mod_base = OTHER; note = 2'-O-methyluridine-3'-phosphate ((2S,4R)-1-[29-[[2-(acetylamino)-2-deoxy-beta-D-galactopyra nosyl]oxy]-14,14-bis[[3-[[3-[[5-[[2-(acetylamino)-2-deoxy-b eta-D-galactopyranosyl]oxy]-1-oxopentyl]amino]propyl]amino] -3-oxopropoxy]methyl]-1,12,19,25-tetraoxo-16-oxa-13,20,24-t riazanonacos-1-yl]-4-hydroxy-2-pyrrolidinyl)methyl ester
gtggtagaagagtctgagctt

SEQ ID NO: 306 - RNA, 21 nt, synthetic construct
  source 1..21: mol_type = other RNA
  modified_base 1: mod_base = OTHER; note = 2'-O-methyluridine-3'-phosphorothioate
  modified_base 2: mod_base = OTHER; note = 2'-O-methylguanosine-3'-phosphorothioate
  modified_base 3: mod_base = OTHER; note = 2'-O-methylguanosine-3'-phosphate
  modified_base 4: mod_base = OTHER; note = 2'-O-methylcytidine-3'-phosphate
  modified_base 5: mod_base = OTHER; note = 2'-O-methyladenosine-3'-phosphate
  modified_base 6: mod_base = OTHER; note = 2'-O-methylcytidine-3'-phosphate
  modified_base 7: mod_base = OTHER; note = 2'-deoxy-2'-fluoroguanosine-3'-phosphate
  modified_base 8: mod_base = OTHER; note = 2'-O-methyladenosine-3'-phosphate
  modified_base 9: mod_base = OTHER; note = 2'-deoxy-2'-fluoroadenosine-3'-phosphate
  modified_base 10: mod_base = OTHER; note = 2'-deoxy-2'-fluorocytidine-3'-phosphate
  modified_base 11: mod_base = OTHER; note = 2'-deoxy-2'-fluoroadenosine-3'-phosphate
  modified_base 12: mod_base = OTHER; note = 2'-O-methylguanosine-3'-phosphate
  modified_base 13: mod_base = OTHER; note = 2'-O-methylcytidine-3'-phosphate
  modified_base 14: mod_base = OTHER; note = 2'-O-methyladenosine-3'-phosphate
  modified_base 15: mod_base = OTHER; note = 2'-O-methylguanosine-3'-phosphate
  modified_base 16: mod_base = OTHER; note = 2'-O-methylguanosine-3'-phosphate
  modified_base 17: mod_base = OTHER; note = 2'-O-methylcytidine-3'-phosphate
  modified_base 18: mod_base = OTHER; note = 2'-O-methyluridine-3'-phosphate
  modified_base 19: mod_base = OTHER; note = 2'-O-methyladenosine-3'-phosphate
  modified_base 20: mod_base = OTHER; note = 2'-O-methyluridine-3'-phosphate
  modified_base 21: mod_base = OTHER; note = 2'-O-methyluridine-3'-phosphate ((2S,4R)-1-[29-[[2-(acetylamino)-2-deoxy-beta-D-galactopyra nosyl]oxy]-14,14-bis[[3-[[3-[[5-[[2-(acetylamino)-2-deoxy-b eta-D-galactopyranosyl]oxy]-1-oxopentyl]amino]propyl]amino] -3-oxopropoxy]methyl]-1,12,19,25-tetraoxo-16-oxa-13,20,24-t riazanonacos-1-yl]-4-hydroxy-2-pyrrolidinyl)methyl ester
tggcacgaacagcaggctatt

SEQ ID NO: 307 - RNA, 21 nt, synthetic construct
  source 1..21: mol_type = other RNA
  modified_base 1: mod_base = OTHER; note = 2'-O-methylcytidine-3'-phosphorothioate
  modified_base 2: mod_base = OTHER; note = 2'-O-methyluridine-3'-phosphorothioate
  modified_base 3: mod_base = OTHER; note = 2'-O-methyladenosine-3'-phosphate
  modified_base 4: mod_base = OTHER; note = 2'-O-methyluridine-3'-phosphate
  modified_base 5: mod_base = OTHER; note = 2'-O-methylguanosine-3'-phosphate
  modified_base 6: mod_base = OTHER; note = 2'-O-methylguanosine-3'-phosphate
  modified_base 7: mod_base = OTHER; note = 2'-deoxy-2'-fluoroguanosine-3'-phosphate
  modified_base 8: mod_base = OTHER; note = 2'-O-methyladenosine-3'-phosphate
  modified_base 9: mod_base = OTHER; note = 2'-deoxy-2'-fluorouridine-3'-phosphate
  modified_base 10: mod_base = OTHER; note = 2'-deoxy-2'-fluorocytidine-3'-phosphate
  modified_base 11: mod_base = OTHER; note = 2'-deoxy-2'-fluoroadenosine-3'-phosphate
  modified_base 12: mod_base = OTHER; note = 2'-O-methyladenosine-3'-phosphate
  modified_base 13: mod_base = OTHER; note = 2'-O-methylcytidine-3'-phosphate
  modified_base 14: mod_base = OTHER; note = 2'-O-methyladenosine-3'-phosphate
  modified_base 15: mod_base = OTHER; note = 2'-O-methyluridine-3'-phosphate
  modified_base 16: mod_base = OTHER; note = 2'-O-methyluridine-3'-phosphate
  modified_base 17: mod_base = OTHER; note = 2'-O-methyluridine-3'-phosphate
  modified_base 18: mod_base = OTHER; note = 2'-O-methyluridine-3'-phosphate
  modified_base 19: mod_base = OTHER; note = 2'-O-methyladenosine-3'-phosphate
  modified_base 20: mod_base = OTHER; note = 2'-O-methylguanosine-3'-phosphate
  modified_base 21: mod_base = OTHER; note = 2'-O-methyluridine-3'-phosphate ((2S,4R)-1-[29-[[2-(acetylamino)-2-deoxy-beta-D-galactopyra nosyl]oxy]-14,14-bis[[3-[[3-[[5-[[2-(acetylamino)-2-deoxy-b eta-D-galactopyranosyl]oxy]-1-oxopentyl]amino]propyl]amino] -3-oxopropoxy]methyl]-1,12,19,25-tetraoxo-16-oxa-13,20,24-t riazanonacos-1-yl]-4-hydroxy-2-pyrrolidinyl)methyl ester
ctatgggatcaacattttagt

SEQ ID NO: 308 - RNA, 21 nt, synthetic construct
  source 1..21: mol_type = other RNA
  modified_base 1: mod_base = OTHER; note = 2'-O-methyladenosine-3'-phosphorothioate
  modified_base 2: mod_base = OTHER; note = 2'-O-methylcytidine-3'-phosphorothioate
  modified_base 3: mod_base = OTHER; note = 2'-O-methyladenosine-3'-phosphate
  modified_base 4: mod_base = OTHER; note = 2'-O-methylcytidine-3'-phosphate
  modified_base 5: mod_base = OTHER; note = 2'-O-methylcytidine-3'-phosphate
  modified_base 6: mod_base = OTHER; note = 2'-O-methyluridine-3'-phosphate
  modified_base 7: mod_base = OTHER; note = 2'-deoxy-2'-fluorouridine-3'-phosphate
  modified_base 8: mod_base = OTHER; note = 2'-O-methyluridine-3'-phosphate
  modified_base 9: mod_base = OTHER; note = 2'-deoxy-2'-fluorouridine-3'-phosphate
  modified_base 10: mod_base = OTHER; note = 2'-deoxy-2'-fluoroguanosine-3'-phosphate
  modified_base 11: mod_base = OTHER; note = 2'-deoxy-2'-fluoroadenosine-3'-phosphate
  modified_base 12: mod_base = OTHER; note = 2'-O-methylcytidine-3'-phosphate
  modified_base 13: mod_base = OTHER; note = 2'-O-methyladenosine-3'-phosphate
  modified_base 14: mod_base = OTHER; note = 2'-O-methyladenosine-3'-phosphate
  modified_base 15: mod_base = OTHER; note = 2'-O-methyluridine-3'-phosphate
  modified_base 16: mod_base = OTHER; note = 2'-O-methylguanosine-3'-phosphate
  modified_base 17: mod_base = OTHER; note = 2'-O-methyladenosine-3'-phosphate
  modified_base 18: mod_base = OTHER; note = 2'-O-methylguanosine-3'-phosphate
  modified_base 19: mod_base = OTHER; note = 2'-O-methyluridine-3'-phosphate
  modified_base 20: mod_base = OTHER; note = 2'-O-methyluridine-3'-phosphate
  modified_base 21: mod_base = OTHER; note = 2'-O-methyluridine-3'-phosphate ((2S,4R)-1-[29-[[2-(acetylamino)-2-deoxy-beta-D-galactopyra nosyl]oxy]-14,14-bis[[3-[[3-[[5-[[2-(acetylamino)-2-deoxy-b eta-D-galactopyranosyl]oxy]-1-oxopentyl]amino]propyl]amino] -3-oxopropoxy]methyl]-1,12,19,25-tetraoxo-16-oxa-13,20,24-t riazanonacos-1-yl]-4-hydroxy-2-pyrrolidinyl)methyl ester
acaccttttgacaatgagttt

SEQ ID NO: 309 - RNA, 21 nt, synthetic construct
  source 1..21: mol_type = other RNA
  modified_base 1: mod_base = OTHER; note = 2'-O-methylguanosine-3'-phosphorothioate
  modified_base 2: mod_base = OTHER; note = 2'-O-methyluridine-3'-phosphorothioate
  modified_base 3: mod_base = OTHER; note = 2'-O-methyluridine-3'-phosphate
  modified_base 4: mod_base = OTHER; note = 2'-O-methylcytidine-3'-phosphate
  modified_base 5: mod_base = OTHER; note = 2'-O-methyluridine-3'-phosphate
  modified_base 6: mod_base = OTHER; note = 2'-O-methyladenosine-3'-phosphate
  modified_base 7: mod_base = OTHER; note = 2'-deoxy-2'-fluorocytidine-3'-phosphate
  modified_base 8: mod_base = OTHER; note = 2'-O-methyladenosine-3'-phosphate
  modified_base 9: mod_base = OTHER; note = 2'-deoxy-2'-fluoroadenosine-3'-phosphate
  modified_base 10: mod_base = OTHER; note = 2'-deoxy-2'-fluorouridine-3'-phosphate
  modified_base 11: mod_base = OTHER; note = 2'-deoxy-2'-fluoroguanosine-3'-phosphate
  modified_base 12: mod_base = OTHER; note = 2'-O-methylguanosine-3'-phosphate
  modified_base 13: mod_base = OTHER; note = 2'-O-methyladenosine-3'-phosphate
  modified_base 14: mod_base = OTHER; note = 2'-O-methylcytidine-3'-phosphate
  modified_base 15: mod_base = OTHER; note = 2'-O-methyluridine-3'-phosphate
  modified_base 16: mod_base = OTHER; note = 2'-O-methylcytidine-3'-phosphate
  modified_base 17: mod_base = OTHER; note = 2'-O-methyluridine-3'-phosphate
  modified_base 18: mod_base = OTHER; note = 2'-O-methylguanosine-3'-phosphate
  modified_base 19: mod_base = OTHER; note = 2'-O-methyluridine-3'-phosphate
  modified_base 20: mod_base = OTHER; note = 2'-O-methyladenosine-3'-phosphate
  modified_base 21: mod_base = OTHER; note = 2'-O-methyluridine-3'-phosphate ((2S,4R)-1-[29-[[2-(acetylamino)-2-deoxy-beta-D-galactopyra nosyl]oxy]-14,14-bis[[3-[[3-[[5-[[2-(acetylamino)-2-deoxy-b eta-D-galactopyranosyl]oxy]-1-oxopentyl]amino]propyl]amino] -3-oxopropoxy]methyl]-1,12,19,25-tetraoxo-16-oxa-13,20,24-t riazanonacos-1-yl]-4-hydroxy-2-pyrrolidinyl)methyl ester
gttctacaatggactctgtat

SEQ ID NO: 310 - RNA, 21 nt, synthetic construct
  source 1..21: mol_type = other RNA
  modified_base 1: mod_base = OTHER; note = 2'-O-methyluridine-3'-phosphorothioate
  modified_base 2: mod_base = OTHER; note = 2'-O-methylguanosine-3'-phosphorothioate
  modified_base 3: mod_base = OTHER; note = 2'-O-methylguanosine-3'-phosphate
  modified_base 4: mod_base = OTHER; note = 2'-O-methyladenosine-3'-phosphate
  modified_base 5: mod_base = OTHER; note = 2'-O-methyladenosine-3'-phosphate
  modified_base 6: mod_base = OTHER; note = 2'-O-methyladenosine-3'-phosphate
  modified_base 7: mod_base = OTHER; note = 2'-deoxy-2'-fluorocytidine-3'-phosphate
  modified_base 8: mod_base = OTHER; note = 2'-O-methyladenosine-3'-phosphate
  modified_base 9: mod_base = OTHER; note = 2'-deoxy-2'-fluorocytidine-3'-phosphate
  modified_base 10: mod_base = OTHER; note = 2'-deoxy-2'-fluorouridine-3'-phosphate
  modified_base 11: mod_base = OTHER; note = 2'-deoxy-2'-fluorocytidine-3'-phosphate
  modified_base 12: mod_base = OTHER; note = 2'-O-methyluridine-3'-phosphate
  modified_base 13: mod_base = OTHER; note = 2'-O-methylguanosine-3'-phosphate
  modified_base 14: mod_base = OTHER; note = 2'-O-methyladenosine-3'-phosphate
  modified_base 15: mod_base = OTHER; note = 2'-O-methylcytidine-3'-phosphate
  modified_base 16: mod_base = OTHER; note = 2'-O-methyladenosine-3'-phosphate
  modified_base 17: mod_base = OTHER; note = 2'-O-methyluridine-3'-phosphate
  modified_base 18: mod_base = OTHER; note = 2'-O-methyladenosine-3'-phosphate
  modified_base 19: mod_base = OTHER; note = 2'-O-methylcytidine-3'-phosphate
  modified_base 20: mod_base = OTHER; note = 2'-O-methyluridine-3'-phosphate
  modified_base 21: mod_base = OTHER; note = 2'-O-methyluridine-3'-phosphate ((2S,4R)-1-[29-[[2-(acetylamino)-2-deoxy-beta-D-galactopyra nosyl]oxy]-14,14-bis[[3-[[3-[[5-[[2-(acetylamino)-2-deoxy-b eta-D-galactopyranosyl]oxy]-1-oxopentyl]amino]propyl]amino] -3-oxopropoxy]methyl]-1,12,19,25-tetraoxo-16-oxa-13,20,24-t riazanonacos-1-yl]-4-hydroxy-2-pyrrolidinyl)methyl ester
tggaaacactctgacatactt

SEQ ID NO: 311 - RNA, 21 nt, synthetic construct
  source 1..21: mol_type = other RNA
  modified_base 1: mod_base = OTHER; note = 2'-O-methylguanosine-3'-phosphorothioate
  modified_base 2: mod_base = OTHER; note = 2'-O-methyladenosine-3'-phosphorothioate
  modified_base 3: mod_base = OTHER; note = 2'-O-methylcytidine-3'-phosphate
  modified_base 4: mod_base = OTHER; note = 2'-O-methyladenosine-3'-phosphate
  modified_base 5: mod_base = OTHER; note = 2'-O-methyluridine-3'-phosphate
  modified_base 6: mod_base = OTHER; note = 2'-O-methyladenosine-3'-phosphate
  modified_base 7: mod_base = OTHER; note = 2'-deoxy-2'-fluorocytidine-3'-phosphate
  modified_base 8: mod_base = OTHER; note = 2'-O-methyluridine-3'-phosphate
  modified_base 9: mod_base = OTHER; note = 2'-deoxy-2'-fluoroadenosine-3'-phosphate
  modified_base 10: mod_base = OTHER; note = 2'-deoxy-2'-fluorocytidine-3'-phosphate
  modified_base 11: mod_base = OTHER; note = 2'-deoxy-2'-fluorocytidine-3'-phosphate
  modified_base 12: mod_base = OTHER; note = 2'-O-methylguanosine-3'-phosphate
  modified_base 13: mod_base = OTHER; note = 2'-O-methyladenosine-3'-phosphate
  modified_base 14: mod_base = OTHER; note = 2'-O-methyladenosine-3'-phosphate
  modified_base 15: mod_base = OTHER; note = 2'-O-methylguanosine-3'-phosphate
  modified_base 16: mod_base = OTHER; note = 2'-O-methyladenosine-3'-phosphate
  modified_base 17: mod_base = OTHER; note = 2'-O-methylcytidine-3'-phosphate
  modified_base 18: mod_base = OTHER; note = 2'-O-methylcytidine-3'-phosphate
  modified_base 19: mod_base = OTHER; note = 2'-O-methyluridine-3'-phosphate
  modified_base 20: mod_base = OTHER; note = 2'-O-methyluridine-3'-phosphate
  modified_base 21: mod_base = OTHER; note = 2'-O-methyluridine-3'-phosphate ((2S,4R)-1-[29-[[2-(acetylamino)-2-deoxy-beta-D-galactopyra nosyl]oxy]-14,14-bis[[3-[[3-[[5-[[2-(acetylamino)-2-deoxy-b eta-D-galactopyranosyl]oxy]-1-oxopentyl]amino]propyl]amino] -3-oxopropoxy]methyl]-1,12,19,25-tetraoxo-16-oxa-13,20,24-t riazanonacos-1-yl]-4-hydroxy-2-pyrrolidinyl)methyl ester
gacatactaccgaagaccttt

SEQ ID NO: 312 - RNA, 21 nt, synthetic construct
  source 1..21: mol_type = other RNA
  modified_base 1: mod_base = OTHER; note = 2'-O-methylguanosine-3'-phosphorothioate
  modified_base 2: mod_base = OTHER; note = 2'-O-methyladenosine-3'-phosphorothioate
  modified_base 3: mod_base = OTHER; note = 2'-O-methyladenosine-3'-phosphate
  modified_base 4: mod_base = OTHER; note = 2'-O-methylcytidine-3'-phosphate
  modified_base 5: mod_base = OTHER; note = 2'-O-methylguanosine-3'-phosphate
  modified_base 6: mod_base = OTHER; note = 2'-O-methyluridine-3'-phosphate
  modified_base 7: mod_base = OTHER; note = 2'-deoxy-2'-fluoroguanosine-3'-phosphate
  modified_base 8: mod_base = OTHER; note = 2'-O-methylguanosine-3'-phosphate
  modified_base 9: mod_base = OTHER; note = 2'-deoxy-2'-fluorocytidine-3'-phosphate
  modified_base 10: mod_base = OTHER; note = 2'-deoxy-2'-fluorouridine-3'-phosphate
  modified_base 11: mod_base = OTHER; note = 2'-deoxy-2'-fluorouridine-3'-phosphate
  modified_base 12: mod_base = OTHER; note = 2'-O-methylcytidine-3'-phosphate
  modified_base 13: mod_base = OTHER; note = 2'-O-methyluridine-3'-phosphate
  modified_base 14: mod_base = OTHER; note = 2'-O-methyluridine-3'-phosphate
  modified_base 15: mod_base = OTHER; note = 2'-O-methyluridine-3'-phosphate
  modified_base 16: mod_base = OTHER; note = 2'-O-methylguanosine-3'-phosphate
  modified_base 17: mod_base = OTHER; note = 2'-O-methyladenosine-3'-phosphate
  modified_base 18: mod_base = OTHER; note = 2'-O-methyluridine-3'-phosphate
  modified_base 19: mod_base = OTHER; note = 2'-O-methylcytidine-3'-phosphate
  modified_base 20: mod_base = OTHER; note = 2'-O-methyluridine-3'-phosphate
  modified_base 21: mod_base = OTHER; note = 2'-O-methyluridine-3'-phosphate ((2S,4R)-1-[29-[[2-(acetylamino)-2-deoxy-beta-D-galactopyra nosyl]oxy]-14,14-bis[[3-[[3-[[5-[[2-(acetylamino)-2-deoxy-b eta-D-galactopyranosyl]oxy]-1-oxopentyl]amino]propyl]amino] -3-oxopropoxy]methyl]-1,12,19,25-tetraoxo-16-oxa-13,20,24-t riazanonacos-1-yl]-4-hydroxy-2-pyrrolidinyl)methyl ester
gaacgtggcttctttgatctt

SEQ ID NO: 313 - RNA, 21 nt, synthetic construct
  source 1..21: mol_type = other RNA
  modified_base 1: mod_base = OTHER; note = 2'-O-methyluridine-3'-phosphorothioate
  modified_base 2: mod_base = OTHER; note = 2'-O-methyluridine-3'-phosphorothioate
  modified_base 3: mod_base = OTHER; note = 2'-O-methyluridine-3'-phosphate
  modified_base 4: mod_base = OTHER; note = 2'-O-methylguanosine-3'-phosphate
  modified_base 5: mod_base = OTHER; note = 2'-O-methyladenosine-3'-phosphate
  modified_base 6: mod_base = OTHER; note = 2'-O-methyluridine-3'-phosphate
  modified_base 7: mod_base = OTHER; note = 2'-deoxy-2'-fluorocytidine-3'-phosphate
  modified_base 8: mod_base = OTHER; note = 2'-O-methyluridine-3'-phosphate
  modified_base 9: mod_base = OTHER; note = 2'-deoxy-2'-fluoroadenosine-3'-phosphate
  modified_base 10: mod_base = OTHER; note = 2'-deoxy-2'-fluorouridine-3'-phosphate
  modified_base 11: mod_base = OTHER; note = 2'-deoxy-2'-fluoroguanosine-3'-phosphate
  modified_base 12: mod_base = OTHER; note = 2'-O-methyladenosine-3'-phosphate
  modified_base 13: mod_base = OTHER; note = 2'-O-methyladenosine-3'-phosphate
  modified_base 14: mod_base = OTHER; note = 2'-O-methyladenosine-3'-phosphate
  modified_base 15: mod_base = OTHER; note = 2'-O-methylcytidine-3'-phosphate
  modified_base 16: mod_base = OTHER; note = 2'-O-methylcytidine-3'-phosphate
  modified_base 17: mod_base = OTHER; note = 2'-O-methyladenosine-3'-phosphate
  modified_base 18: mod_base = OTHER; note = 2'-O-methyladenosine-3'-phosphate
  modified_base 19: mod_base = OTHER; note = 2'-O-methyladenosine-3'-phosphate
  modified_base 20: mod_base = OTHER; note = 2'-O-methylguanosine-3'-phosphate
  modified_base 21: mod_base = OTHER; note = 2'-O-methyluridine-3'-phosphate ((2S,4R)-1-[29-[[2-(acetylamino)-2-deoxy-beta-D-galactopyra nosyl]oxy]-14,14-bis[[3-[[3-[[5-[[2-(acetylamino)-2-deoxy-b eta-D-galactopyranosyl]oxy]-1-oxopentyl]amino]propyl]amino] -3-oxopropoxy]methyl]-1,12,19,25-tetraoxo-16-oxa-13,20,24-t riazanonacos-1-yl]-4-hydroxy-2-pyrrolidinyl)methyl ester
tttgatctatgaaaccaaagt

SEQ ID NO: 314 - RNA, 21 nt, synthetic construct
  source 1..21: mol_type = other RNA
  modified_base 1: mod_base = OTHER; note = 2'-O-methyladenosine-3'-phosphorothioate
  modified_base 2: mod_base = OTHER; note = 2'-O-methyladenosine-3'-phosphorothioate
  modified_base 3: mod_base = OTHER; note = 2'-O-methylcytidine-3'-phosphate
  modified_base 4: mod_base = OTHER; note = 2'-O-methylcytidine-3'-phosphate
  modified_base 5: mod_base = OTHER; note = 2'-O-methylguanosine-3'-phosphate
  modified_base 6: mod_base = OTHER; note = 2'-O-methyladenosine-3'-phosphate
  modified_base 7: mod_base = OTHER; note = 2'-deoxy-2'-fluoroadenosine-3'-phosphate
  modified_base 8: mod_base = OTHER; note = 2'-O-methylcytidine-3'-phosphate
  modified_base 9: mod_base = OTHER; note = 2'-deoxy-2'-fluoroadenosine-3'-phosphate
  modified_base 10: mod_base = OTHER; note = 2'-deoxy-2'-fluorouridine-3'-phosphate
  modified_base 11: mod_base = OTHER; note = 2'-deoxy-2'-fluorouridine-3'-phosphate
  modified_base 12: mod_base = OTHER; note = 2'-O-methyladenosine-3'-phosphate
  modified_base 13: mod_base = OTHER; note = 2'-O-methylcytidine-3'-phosphate
  modified_base 14: mod_base = OTHER; note = 2'-O-methylguanosine-3'-phosphate
  modified_base 15: mod_base = OTHER; note = 2'-O-methyladenosine-3'-phosphate
  modified_base 16: mod_base = OTHER; note = 2'-O-methyladenosine-3'-phosphate
  modified_base 17: mod_base = OTHER; note = 2'-O-methylguanosine-3'-phosphate
  modified_base 18: mod_base = OTHER; note = 2'-O-methyladenosine-3'-phosphate
  modified_base 19: mod_base = OTHER; note = 2'-O-methyladenosine-3'-phosphate
  modified_base 20: mod_base = OTHER; note = 2'-O-methylcytidine-3'-phosphate
  modified_base 21: mod_base = OTHER; note = 2'-O-methyluridine-3'-phosphate ((2S,4R)-1-[29-[[2-(acetylamino)-2-deoxy-beta-D-galactopyra nosyl]oxy]-14,14-bis[[3-[[3-[[5-[[2-(acetylamino)-2-deoxy-b eta-D-galactopyranosyl]oxy]-1-oxopentyl]amino]propyl]amino] -3-oxopropoxy]methyl]-1,12,19,25-tetraoxo-16-oxa-13,20,24-t riazanonacos-1-yl]-4-hydroxy-2-pyrrolidinyl)methyl ester
aaccgaacattacgaagaact

SEQ ID NO: 315 - RNA, 21 nt, synthetic construct
  source 1..21: mol_type = other RNA
  modified_base 1: mod_base = OTHER; note = 2'-O-methyladenosine-3'-phosphorothioate
  modified_base 2: mod_base = OTHER; note = 2'-O-methyladenosine-3'-phosphorothioate
  modified_base 3: mod_base = OTHER; note = 2'-O-methylguanosine-3'-phosphate
  modified_base 4: mod_base = OTHER; note = 2'-O-methyladenosine-3'-phosphate
  modified_base 5: mod_base = OTHER; note = 2'-O-methyladenosine-3'-phosphate
  modified_base 6: mod_base = OTHER; note = 2'-O-methylcytidine-3'-phosphate
  modified_base 7: mod_base = OTHER; note = 2'-deoxy-2'-fluoroadenosine-3'-phosphate
  modified_base 8: mod_base = OTHER; note = 2'-O-methyladenosine-3'-phosphate
  modified_base 9: mod_base = OTHER; note = 2'-deoxy-2'-fluoroadenosine-3'-phosphate
  modified_base 10: mod_base = OTHER; note = 2'-deoxy-2'-fluorouridine-3'-phosphate
  modified_base 11: mod_base = OTHER; note = 2'-deoxy-2'-fluorouridine-3'-phosphate
  modified_base 12: mod_base = OTHER; note = 2'-O-methylguanosine-3'-phosphate
  modified_base 13: mod_base = OTHER; note = 2'-O-methyladenosine-3'-phosphate
  modified_base 14: mod_base = OTHER; note = 2'-O-methyladenosine-3'-phosphate
  modified_base 15: mod_base = OTHER; note = 2'-O-methylguanosine-3'-phosphate
  modified_base 16: mod_base = OTHER; note = 2'-O-methylcytidine-3'-phosphate
  modified_base 17: mod_base = OTHER; note = 2'-O-methyladenosine-3'-phosphate
  modified_base 18: mod_base = OTHER; note = 2'-O-methyluridine-3'-phosphate
  modified_base 19: mod_base = OTHER; note = 2'-O-methyluridine-3'-phosphate
  modified_base 20: mod_base = OTHER; note = 2'-O-methyluridine-3'-phosphate
  modified_base 21: mod_base = OTHER; note = 2'-O-methyluridine-3'-phosphate ((2S,4R)-1-[29-[[2-(acetylamino)-2-deoxy-beta-D-galactopyra nosyl]oxy]-14,14-bis[[3-[[3-[[5-[[2-(acetylamino)-2-deoxy-b eta-D-galactopyranosyl]oxy]-1-oxopentyl]amino]propyl]amino] -3-oxopropoxy]methyl]-1,12,19,25-tetraoxo-16-oxa-13,20,24-t riazanonacos-1-yl]-4-hydroxy-2-pyrrolidinyl)methyl ester
aagaacaaattgaagcatttt

SEQ ID NO: 316 - RNA, 21 nt, synthetic construct
  source 1..21: mol_type = other RNA
  modified_base 1: mod_base = OTHER; note = 2'-O-methyladenosine-3'-phosphorothioate
  modified_base 2: mod_base = OTHER; note = 2'-O-methyladenosine-3'-phosphorothioate
  modified_base 3: mod_base = OTHER; note = 2'-O-methylguanosine-3'-phosphate
  modified_base 4: mod_base = OTHER; note = 2'-O-methylcytidine-3'-phosphate
  modified_base 5: mod_base = OTHER; note = 2'-O-methyladenosine-3'-phosphate
  modified_base 6: mod_base = OTHER; note = 2'-O-methyluridine-3'-phosphate
  modified_base 7: mod_base = OTHER; note = 2'-deoxy-2'-fluorouridine-3'-phosphate
  modified_base 8: mod_base = OTHER; note = 2'-O-methyluridine-3'-phosphate
  modified_base 9: mod_base = OTHER; note = 2'-deoxy-2'-fluoroadenosine-3'-phosphate
  modified_base 10: mod_base = OTHER; note = 2'-deoxy-2'-fluoroadenosine-3'-phosphate
  modified_base 11: mod_base = OTHER; note = 2'-deoxy-2'-fluoroadenosine-3'-phosphate
  modified_base 12: mod_base = OTHER; note = 2'-O-methyladenosine-3'-phosphate
  modified_base 13: mod_base = OTHER; note = 2'-O-methylguanosine-3'-phosphate
  modified_base 14: mod_base = OTHER; note = 2'-O-methyluridine-3'-phosphate
  modified_base 15: mod_base = OTHER; note = 2'-O-methyladenosine-3'-phosphate
  modified_base 16: mod_base = OTHER; note = 2'-O-methyluridine-3'-phosphate
  modified_base 17: mod_base = OTHER; note = 2'-O-methylcytidine-3'-phosphate
  modified_base 18: mod_base = OTHER; note = 2'-O-methyladenosine-3'-phosphate
  modified_base 19: mod_base = OTHER; note = 2'-O-methyluridine-3'-phosphate
  modified_base 20: mod_base = OTHER; note = 2'-O-methylcytidine-3'-phosphate
  modified_base 21: mod_base = OTHER; note = 2'-O-methyluridine-3'-phosphate ((2S,4R)-1-[29-[[2-(acetylamino)-2-deoxy-beta-D-galactopyra nosyl]oxy]-14,14-bis[[3-[[3-[[5-[[2-(acetylamino)-2-deoxy-b eta-D-galactopyranosyl]oxy]-1-oxopentyl]amino]propyl]amino] -3-oxopropoxy]methyl]-1,12,19,25-tetraoxo-16-oxa-13,20,24-t riazanonacos-1-yl]-4-hydroxy-2-pyrrolidinyl)methyl ester
aagcatttaaaagtatcatct

SEQ ID NO: 317 - RNA, 21 nt, synthetic construct
  source 1..21: mol_type = other RNA
  modified_base 1: mod_base = OTHER; note = 2'-O-methyluridine-3'-phosphorothioate
  modified_base 2: mod_base = OTHER; note = 2'-O-methyladenosine-3'-phosphorothioate
  modified_base 3: mod_base = OTHER; note = 2'-O-methyluridine-3'-phosphate
  modified_base 4: mod_base = OTHER; note = 2'-O-methylcytidine-3'-phosphate
  modified_base 5: mod_base = OTHER; note = 2'-O-methyladenosine-3'-phosphate
  modified_base 6: mod_base = OTHER; note = 2'-O-methyluridine-3'-phosphate
  modified_base 7: mod_base = OTHER; note = 2'-deoxy-2'-fluorocytidine-3'-phosphate
  modified_base 8: mod_base = OTHER; note = 2'-O-methylcytidine-3'-phosphate
  modified_base 9: mod_base = OTHER; note = 2'-deoxy-2'-fluoroadenosine-3'-phosphate
  modified_base 10: mod_base = OTHER; note = 2'-deoxy-2'-fluoroadenosine-3'-phosphate
  modified_base 11: mod_base = OTHER; note = 2'-deoxy-2'-fluoroguanosine-3'-phosphate
  modified_base 12: mod_base = OTHER; note = 2'-O-methyladenosine-3'-phosphate
  modified_base 13: mod_base = OTHER; note = 2'-O-methylguanosine-3'-phosphate
  modified_base 14: mod_base = OTHER; note = 2'-O-methyladenosine-3'-phosphate
  modified_base 15: mod_base = OTHER; note = 2'-O-methyladenosine-3'-phosphate
  modified_base 16: mod_base = OTHER; note = 2'-O-methylguanosine-3'-phosphate
  modified_base 17: mod_base = OTHER; note = 2'-O-methyladenosine-3'-phosphate
  modified_base 18: mod_base = OTHER; note = 2'-O-methylcytidine-3'-phosphate
  modified_base 19: mod_base = OTHER; note = 2'-O-methyladenosine-3'-phosphate
  modified_base 20: mod_base = OTHER; note = 2'-O-methyluridine-3'-phosphate
  modified_base 21: mod_base = OTHER; note = 2'-O-methyluridine-3'-phosphate ((2S,4R)-1-[29-[[2-(acetylamino)-2-deoxy-beta-D-galactopyra nosyl]oxy]-14,14-bis[[3-[[3-[[5-[[2-(acetylamino)-2-deoxy-b eta-D-galactopyranosyl]oxy]-1-oxopentyl]amino]propyl]amino] -3-oxopropoxy]methyl]-1,12,19,25-tetraoxo-16-oxa-13,20,24-t riazanonacos-1-yl]-4-hydroxy-2-pyrrolidinyl)methyl ester
tatcatccaagagaagacatt

SEQ ID NO: 318 - RNA, 21 nt, synthetic construct
  source 1..21: mol_type = other RNA
  modified_base 1: mod_base = OTHER; note = 2'-O-methylguanosine-3'-phosphorothioate
  modified_base 2: mod_base = OTHER; note = 2'-O-methyladenosine-3'-phosphorothioate
  modified_base 3: mod_base = OTHER; note = 2'-O-methyladenosine-3'-phosphate
  modified_base 4: mod_base = OTHER; note = 2'-O-methylguanosine-3'-phosphate
  modified_base 5: mod_base = OTHER; note = 2'-O-methyladenosine-3'-phosphate
  modified_base 6: mod_base = OTHER; note = 2'-O-methylcytidine-3'-phosphate
  modified_base 7: mod_base = OTHER; note = 2'-deoxy-2'-fluoroadenosine-3'-phosphate
  modified_base 8: mod_base = OTHER; note = 2'-O-methyluridine-3'-phosphate
  modified_base 9: mod_base = OTHER; note = 2'-deoxy-2'-fluorocytidine-3'-phosphate
  modified_base 10: mod_base = OTHER; note = 2'-deoxy-2'-fluoroadenosine-3'-phosphate
  modified_base 11: mod_base = OTHER; note = 2'-deoxy-2'-fluoroadenosine-3'-phosphate
  modified_base 12: mod_base = OTHER; note = 2'-O-methyladenosine-3'-phosphate
  modified_base 13: mod_base = OTHER; note = 2'-O-methyluridine-3'-phosphate
  modified_base 14: mod_base = OTHER; note = 2'-O-methyluridine-3'-phosphate
  modified_base 15: mod_base = OTHER; note = 2'-O-methyluridine-3'-phosphate
  modified_base 16: mod_base = OTHER; note = 2'-O-methyluridine-3'-phosphate
  modified_base 17: mod_base = OTHER; note = 2'-O-methyladenosine-3'-phosphate
  modified_base 18: mod_base = OTHER; note = 2'-O-methyladenosine-3'-phosphate
  modified_base 19: mod_base = OTHER; note = 2'-O-methyluridine-3'-phosphate
  modified_base 20: mod_base = OTHER; note = 2'-O-methylguanosine-3'-phosphate
  modified_base 21: mod_base = OTHER; note = 2'-O-methyluridine-3'-phosphate ((2S,4R)-1-[29-[[2-(acetylamino)-2-deoxy-beta-D-galactopyra nosyl]oxy]-14,14-bis[[3-[[3-[[5-[[2-(acetylamino)-2-deoxy-b eta-D-galactopyranosyl]oxy]-1-oxopentyl]amino]propyl]amino] -3-oxopropoxy]methyl]-1,12,19,25-tetraoxo-16-oxa-13,20,24-t riazanonacos-1-yl]-4-hydroxy-2-pyrrolidinyl)methyl ester
gaagacatcaaattttaatgt

SEQ ID NO: 319 - RNA, 21 nt, synthetic construct
  source 1..21: mol_type = other RNA
  modified_base 1: mod_base = OTHER; note = 2'-O-methyluridine-3'-phosphorothioate
  modified_base 2: mod_base = OTHER; note = 2'-O-methyluridine-3'-phosphorothioate
  modified_base 3: mod_base = OTHER; note = 2'-O-methyluridine-3'-phosphate
  modified_base 4: mod_base = OTHER; note = 2'-O-methyladenosine-3'-phosphate
  modified_base 5: mod_base = OTHER; note = 2'-O-methyladenosine-3'-phosphate
  modified_base 6: mod_base = OTHER; note = 2'-O-methyluridine-3'-phosphate
  modified_base 7: mod_base = OTHER; note = 2'-deoxy-2'-fluoroguanosine-3'-phosphate
  modified_base 8: mod_base = OTHER; note = 2'-O-methylcytidine-3'-phosphate
  modified_base 9: mod_base = OTHER; note = 2'-deoxy-2'-fluoroadenosine-3'-phosphate
  modified_base 10: mod_base = OTHER; note = 2'-deoxy-2'-fluoroguanosine-3'-phosphate
  modified_base 11: mod_base = OTHER; note = 2'-deoxy-2'-fluorocytidine-3'-phosphate
  modified_base 12: mod_base = OTHER; note = 2'-O-methyluridine-3'-phosphate
  modified_base 13: mod_base = OTHER; note = 2'-O-methyladenosine-3'-phosphate
  modified_base 14: mod_base = OTHER; note = 2'-O-methyluridine-3'-phosphate
  modified_base 15: mod_base = OTHER; note = 2'-O-methyladenosine-3'-phosphate
  modified_base 16: mod_base = OTHER; note = 2'-O-methyluridine-3'-phosphate
  modified_base 17: mod_base = OTHER; note = 2'-O-methylcytidine-3'-phosphate
  modified_base 18: mod_base = OTHER; note = 2'-O-methyluridine-3'-phosphate
  modified_base 19: mod_base = OTHER; note = 2'-O-methylcytidine-3'-phosphate
  modified_base 20: mod_base = OTHER; note = 2'-O-methyluridine-3'-phosphate
  modified_base 21: mod_base = OTHER; note = 2'-O-methyluridine-3'-phosphate ((2S,4R)-1-[29-[[2-(acetylamino)-2-deoxy-beta-D-galactopyra nosyl]oxy]-14,14-bis[[3-[[3-[[5-[[2-(acetylamino)-2-deoxy-b eta-D-galactopyranosyl]oxy]-1-oxopentyl]amino]propyl]amino] -3-oxopropoxy]methyl]-1,12,19,25-tetraoxo-16-oxa-13,20,24-t riazanonacos-1-yl]-4-hydroxy-2-pyrrolidinyl)methyl ester
tttaatgcagctatatctctt

SEQ ID NO: 320 - RNA, 21 nt, synthetic construct
  source 1..21: mol_type = other RNA
  modified_base 1: mod_base = OTHER; note = 2'-O-methyladenosine-3'-phosphorothioate
  modified_base 2: mod_base = OTHER; note = 2'-O-methyluridine-3'-phosphorothioate
  modified_base 3: mod_base = OTHER; note = 2'-O-methyladenosine-3'-phosphate
  modified_base 4: mod_base = OTHER; note = 2'-O-methyluridine-3'-phosphate
  modified_base 5: mod_base = OTHER; note = 2'-O-methylcytidine-3'-phosphate
  modified_base 6: mod_base = OTHER; note = 2'-O-methyluridine-3'-phosphate
  modified_base 7: mod_base = OTHER; note = 2'-deoxy-2'-fluorocytidine-3'-phosphate
  modified_base 8: mod_base = OTHER; note = 2'-O-methyluridine-3'-phosphate
  modified_base 9: mod_base = OTHER; note = 2'-deoxy-2'-fluoroadenosine-3'-phosphate
  modified_base 10: mod_base = OTHER; note = 2'-deoxy-2'-fluoroadenosine-3'-phosphate
  modified_base 11: mod_base = OTHER; note = 2'-deoxy-2'-fluoroadenosine-3'-phosphate
  modified_base 12: mod_base = OTHER; note = 2'-O-methyladenosine-3'-phosphate
  modified_base 13: mod_base = OTHER; note = 2'-O-methyluridine-3'-phosphate
  modified_base 14: mod_base = OTHER; note = 2'-O-methyluridine-3'-phosphate
  modified_base 15: mod_base = OTHER; note = 2'-O-methyluridine-3'-phosphate
  modified_base 16: mod_base = OTHER; note = 2'-O-methyladenosine-3'-phosphate
  modified_base 17: mod_base = OTHER; note = 2'-O-methylcytidine-3'-phosphate
  modified_base 18: mod_base = OTHER; note = 2'-O-methyladenosine-3'-phosphate
  modified_base 19: mod_base = OTHER; note = 2'-O-methylcytidine-3'-phosphate
  modified_base 20: mod_base = OTHER; note = 2'-O-methylcytidine-3'-phosphate
  modified_base 21: mod_base = OTHER; note = 2'-O-methyluridine-3'-phosphate ((2S,4R)-1-[29-[[2-(acetylamino)-2-deoxy-beta-D-galactopyra nosyl]oxy]-14,14-bis[[3-[[3-[[5-[[2-(acetylamino)-2-deoxy-b eta-D-galactopyranosyl]oxy]-1-oxopentyl]amino]propyl]amino] -3-oxopropoxy]methyl]-1,12,19,25-tetraoxo-16-oxa-13,20,24-t riazanonacos-1-yl]-4-hydroxy-2-pyrrolidinyl)methyl ester
atatctctaaaatttacacct

SEQ ID NO: 321 - RNA, 21 nt, synthetic construct
  source 1..21: mol_type = other RNA
  modified_base 1: mod_base = OTHER; note = 2'-O-methylcytidine-3'-phosphorothioate
  modified_base 2: mod_base = OTHER; note = 2'-O-methylcytidine-3'-phosphorothioate
  modified_base 3: mod_base = OTHER; note = 2'-O-methyladenosine-3'-phosphate
  modified_base 4: mod_base = OTHER; note = 2'-O-methylcytidine-3'-phosphate
  modified_base 5: mod_base = OTHER; note = 2'-O-methyluridine-3'-phosphate
  modified_base 6: mod_base = OTHER; note = 2'-O-methylguanosine-3'-phosphate
  modified_base 7: mod_base = OTHER; note = 2'-deoxy-2'-fluoroadenosine-3'-phosphate
  modified_base 8: mod_base = OTHER; note = 2'-O-methyladenosine-3'-phosphate
  modified_base 9: mod_base = OTHER; note = 2'-deoxy-2'-fluoroadenosine-3'-phosphate
  modified_base 10: mod_base = OTHER; note = 2'-deoxy-2'-fluorocytidine-3'-phosphate
  modified_base 11: mod_base = OTHER; note = 2'-deoxy-2'-fluoroadenosine-3'-phosphate
  modified_base 12: mod_base = OTHER; note = 2'-O-methyladenosine-3'-phosphate
  modified_base 13: mod_base = OTHER; note = 2'-O-methyladenosine-3'-phosphate
  modified_base 14: mod_base = OTHER; note = 2'-O-methyluridine-3'-phosphate
  modified_base 15: mod_base = OTHER; note = 2'-O-methyladenosine-3'-phosphate
  modified_base 16: mod_base = OTHER; note = 2'-O-methyladenosine-3'-phosphate
  modified_base 17: mod_base = OTHER; note = 2'-O-methyladenosine-3'-phosphate
  modified_base 18: mod_base = OTHER; note = 2'-O-methylguanosine-3'-phosphate
  modified_base 19: mod_base = OTHER; note = 2'-O-methylcytidine-3'-phosphate
  modified_base 20: mod_base = OTHER; note = 2'-O-methyluridine-3'-phosphate
  modified_base 21: mod_base = OTHER; note = 2'-O-methyluridine-3'-phosphate ((2S,4R)-1-[29-[[2-(acetylamino)-2-deoxy-beta-D-galactopyra nosyl]oxy]-14,14-bis[[3-[[3-[[5-[[2-(acetylamino)-2-deoxy-b eta-D-galactopyranosyl]oxy]-1-oxopentyl]amino]propyl]amino] -3-oxopropoxy]methyl]-1,12,19,25-tetraoxo-16-oxa-13,20,24-t riazanonacos-1-yl]-4-hydroxy-2-pyrrolidinyl)methyl ester
ccactgaaacaaataaagctt

SEQ ID NO: 322 - RNA, 21 nt, synthetic construct
  source 1..21: mol_type = other RNA
  modified_base 1: mod_base = OTHER; note = 2'-O-methylcytidine-3'-phosphorothioate
  modified_base 2: mod_base = OTHER; note = 2'-O-methyluridine-3'-phosphorothioate
  modified_base 3: mod_base = OTHER; note = 2'-O-methylguanosine-3'-phosphate
  modified_base 4: mod_base = OTHER; note = 2'-O-methyladenosine-3'-phosphate
  modified_base 5: mod_base = OTHER; note = 2'-O-methyladenosine-3'-phosphate
  modified_base 6: mod_base = OTHER; note = 2'-O-methylcytidine-3'-phosphate
  modified_base 7: mod_base = OTHER; note = 2'-deoxy-2'-fluoroadenosine-3'-phosphate
  modified_base 8: mod_base = OTHER; note = 2'-O-methyladenosine-3'-phosphate
  modified_base 9: mod_base = OTHER; note = 2'-deoxy-2'-fluorouridine-3'-phosphate
  modified_base 10: mod_base = OTHER; note = 2'-deoxy-2'-fluoroguanosine-3'-phosphate
  modified_base 11: mod_base = OTHER; note = 2'-deoxy-2'-fluorouridine-3'-phosphate
  modified_base 12: mod_base = OTHER; note = 2'-O-methyluridine-3'-phosphate
  modified_base 13: mod_base = OTHER; note = 2'-O-methylguanosine-3'-phosphate
  modified_base 14: mod_base = OTHER; note = 2'-O-methyluridine-3'-phosphate
  modified_base 15: mod_base = OTHER; note = 2'-O-methylguanosine-3'-phosphate
  modified_base 16: mod_base = OTHER; note = 2'-O-methyladenosine-3'-phosphate
  modified_base 17: mod_base = OTHER; note = 2'-O-methylguanosine-3'-phosphate
  modified_base 18: mod_base = OTHER; note = 2'-O-methylguanosine-3'-phosphate
  modified_base 19: mod_base = OTHER; note = 2'-O-methyladenosine-3'-phosphate
  modified_base 20: mod_base = OTHER; note = 2'-O-methyladenosine-3'-phosphate
  modified_base 21: mod_base = OTHER; note = 2'-O-methyluridine-3'-phosphate ((2S,4R)-1-[29-[[2-(acetylamino)-2-deoxy-beta-D-galactopyra nosyl]oxy]-14,14-bis[[3-[[3-[[5-[[2-(acetylamino)-2-deoxy-b eta-D-galactopyranosyl]oxy]-1-oxopentyl]amino]propyl]amino] -3-oxopropoxy]methyl]-1,12,19,25-tetraoxo-16-oxa-13,20,24-t riazanonacos-1-yl]-4-hydroxy-2-pyrrolidinyl)methyl ester
ctgaacaatgttgtgaggaat

SEQ ID NO: 323 - RNA, 21 nt, synthetic construct
  source 1..21: mol_type = other RNA
  modified_base 1: mod_base = OTHER; note = 2'-O-methylguanosine-3'-phosphorothioate
  modified_base 2: mod_base = OTHER; note = 2'-O-methyluridine-3'-phosphorothioate
  modified_base 3: mod_base = OTHER; note = 2'-O-methylguanosine-3'-phosphate
  modified_base 4: mod_base = OTHER; note = 2'-O-methyladenosine-3'-phosphate
  modified_base 5: mod_base = OTHER; note = 2'-O-methylguanosine-3'-phosphate
  modified_base 6: mod_base = OTHER; note = 2'-O-methylguanosine-3'-phosphate
  modified_base 7: mod_base = OTHER; note = 2'-deoxy-2'-fluoroadenosine-3'-phosphate
  modified_base 8: mod_base = OTHER; note = 2'-O-methyladenosine-3'-phosphate
  modified_base 9: mod_base = OTHER; note = 2'-deoxy-2'-fluoroadenosine-3'-phosphate
  modified_base 10: mod_base = OTHER; note = 2'-deoxy-2'-fluorocytidine-3'-phosphate
  modified_base 11: mod_base = OTHER; note = 2'-deoxy-2'-fluoroadenosine-3'-phosphate
  modified_base 12: mod_base = OTHER; note = 2'-O-methylguanosine-3'-phosphate
  modified_base 13: mod_base = OTHER; note = 2'-O-methylcytidine-3'-phosphate
  modified_base 14: mod_base = OTHER; note = 2'-O-methylcytidine-3'-phosphate
  modified_base 15: mod_base = OTHER; note = 2'-O-methyluridine-3'-phosphate
  modified_base 16: mod_base = OTHER; note = 2'-O-methylcytidine-3'-phosphate
  modified_base 17: mod_base = OTHER; note = 2'-O-methylcytidine-3'-phosphate
  modified_base 18: mod_base = OTHER; note = 2'-O-methyluridine-3'-phosphate
  modified_base 19: mod_base = OTHER; note = 2'-O-methylcytidine-3'-phosphate
  modified_base 20: mod_base = OTHER; note = 2'-O-methyladenosine-3'-phosphate
  modified_base 21: mod_base = OTHER; note = 2'-O-methyluridine-3'-phosphate ((2S,4R)-1-[29-[[2-(acetylamino)-2-deoxy-beta-D-galactopyra nosyl]oxy]-14,14-bis[[3-[[3-[[5-[[2-(acetylamino)-2-deoxy-b eta-D-galactopyranosyl]oxy]-1-oxopentyl]amino]propyl]amino] -3-oxopropoxy]methyl]-1,12,19,25-tetraoxo-16-oxa-13,20,24-t riazanonacos-1-yl]-4-hydroxy-2-pyrrolidinyl)methyl ester
gtgaggaaacagcctcctcat

SEQ ID NO: 324 - RNA, 21 nt, synthetic construct
  source 1..21: mol_type = other RNA
  modified_base 1: mod_base = OTHER; note = 2'-O-methylcytidine-3'-phosphorothioate
  modified_base 2: mod_base = OTHER; note = 2'-O-methylcytidine-3'-phosphorothioate
  modified_base 3: mod_base = OTHER; note = 2'-O-methyluridine-3'-phosphate
  modified_base 4: mod_base = OTHER; note = 2'-O-methylcytidine-3'-phosphate
  modified_base 5: mod_base = OTHER; note = 2'-O-methylcytidine-3'-phosphate
  modified_base 6: mod_base = OTHER; note = 2'-O-methyluridine-3'-phosphate
  modified_base 7: mod_base = OTHER; note = 2'-deoxy-2'-fluorocytidine-3'-phosphate
  modified_base 8: mod_base = OTHER; note = 2'-O-methyladenosine-3'-phosphate
  modified_base 9: mod_base = OTHER; note = 2'-deoxy-2'-fluoroadenosine-3'-phosphate
  modified_base 10: mod_base = OTHER; note = 2'-deoxy-2'-fluorouridine-3'-phosphate
  modified_base 11: mod_base = OTHER; note = 2'-deoxy-2'-fluorouridine-3'-phosphate
  modified_base 12: mod_base = OTHER; note = 2'-O-methyluridine-3'-phosphate
  modified_base 13: mod_base = OTHER; note = 2'-O-methylcytidine-3'-phosphate
  modified_base 14: mod_base = OTHER; note = 2'-O-methyluridine-3'-phosphate
  modified_base 15: mod_base = OTHER; note = 2'-O-methyluridine-3'-phosphate
  modified_base 16: mod_base = OTHER; note = 2'-O-methyluridine-3'-phosphate
  modified_base 17: mod_base = OTHER; note = 2'-O-methyladenosine-3'-phosphate
  modified_base 18: mod_base = OTHER; note = 2'-O-methylcytidine-3'-phosphate
  modified_base 19: mod_base = OTHER; note = 2'-O-methyladenosine-3'-phosphate
  modified_base 20: mod_base = OTHER; note = 2'-O-methyluridine-3'-phosphate
  modified_base 21: mod_base = OTHER; note = 2'-O-methyluridine-3'-phosphate ((2S,4R)-1-[29-[[2-(acetylamino)-2-deoxy-beta-D-galactopyra nosyl]oxy]-14,14-bis[[3-[[3-[[5-[[2-(acetylamino)-2-deoxy-b eta-D-galactopyranosyl]oxy]-1-oxopentyl]amino]propyl]amino] -3-oxopropoxy]methyl]-1,12,19,25-tetraoxo-16-oxa-13,20,24-t riazanonacos-1-yl]-4-hydroxy-2-pyrrolidinyl)methyl ester
cctcctcaatttctttacatt

SEQ ID NO: 325 - RNA, 21 nt, synthetic construct
  source 1..21: mol_type = other RNA
  modified_base 1: mod_base = OTHER; note = 2'-O-methylguanosine-3'-phosphorothioate
  modified_base 2: mod_base = OTHER; note = 2'-O-methylcytidine-3'-phosphorothioate
  modified_base 3: mod_base = OTHER; note = 2'-O-methyladenosine-3'-phosphate
  modified_base 4: mod_base = OTHER; note = 2'-O-methyladenosine-3'-phosphate
  modified_base 5: mod_base = OTHER; note = 2'-O-methylguanosine-3'-phosphate
  modified_base 6: mod_base = OTHER; note = 2'-O-methylguanosine-3'-phosphate
  modified_base 7: mod_base = OTHER; note = 2'-deoxy-2'-fluoroguanosine-3'-phosphate
  modified_base 8: mod_base = OTHER; note = 2'-O-methyluridine-3'-phosphate
  modified_base 9: mod_base = OTHER; note = 2'-deoxy-2'-fluoroadenosine-3'-phosphate
  modified_base 10: mod_base = OTHER; note = 2'-deoxy-2'-fluoroguanosine-3'-phosphate
  modified_base 11: mod_base = OTHER; note = 2'-deoxy-2'-fluorouridine-3'-phosphate
  modified_base 12: mod_base = OTHER; note = 2'-O-methyluridine-3'-phosphate
  modified_base 13: mod_base = OTHER; note = 2'-O-methyluridine-3'-phosphate
  modified_base 14: mod_base = OTHER; note = 2'-O-methyluridine-3'-phosphate
  modified_base 15: mod_base = OTHER; note = 2'-O-methylcytidine-3'-phosphate
  modified_base 16: mod_base = OTHER; note = 2'-O-methylguanosine-3'-phosphate
  modified_base 17: mod_base = OTHER; note = 2'-O-methylguanosine-3'-phosphate
  modified_base 18: mod_base = OTHER; note = 2'-O-methyluridine-3'-phosphate
  modified_base 19: mod_base = OTHER; note = 2'-O-methyluridine-3'-phosphate
  modified_base 20: mod_base = OTHER; note = 2'-O-methyluridine-3'-phosphate
  modified_base 21: mod_base = OTHER; note = 2'-O-methyluridine-3'-phosphate ((2S,4R)-1-[29-[[2-(acetylamino)-2-deoxy-beta-D-galactopyra nosyl]oxy]-14,14-bis[[3-[[3-[[5-[[2-(acetylamino)-2-deoxy-b eta-D-galactopyranosyl]oxy]-1-oxopentyl]amino]propyl]amino] -3-oxopropoxy]methyl]-1,12,19,25-tetraoxo-16-oxa-13,20,24-t riazanonacos-1-yl]-4-hydroxy-2-pyrrolidinyl)methyl ester
gcaagggtagttttcggtttt

SEQ ID NO: 326 - RNA, 21 nt, synthetic construct
  source 1..21: mol_type = other RNA
  modified_base 1: mod_base = OTHER; note = 2'-O-methyluridine-3'-phosphorothioate
  modified_base 2: mod_base = OTHER; note = 2'-O-methyluridine-3'-phosphorothioate
  modified_base 3: mod_base = OTHER; note = 2'-O-methylcytidine-3'-phosphate
  modified_base 4: mod_base = OTHER; note = 2'-O-methylguanosine-3'-phosphate
  modified_base 5: mod_base = OTHER; note = 2'-O-methylguanosine-3'-phosphate
  modified_base 6: mod_base = OTHER; note = 2'-O-methyluridine-3'-phosphate
  modified_base 7: mod_base = OTHER; note = 2'-deoxy-2'-fluorouridine-3'-phosphate
  modified_base 8: mod_base = OTHER; note = 2'-O-methyluridine-3'-phosphate
  modified_base 9: mod_base = OTHER; note = 2'-deoxy-2'-fluorouridine-3'-phosphate
  modified_base 10: mod_base = OTHER; note = 2'-deoxy-2'-fluorocytidine-3'-phosphate
  modified_base 11: mod_base = OTHER; note = 2'-deoxy-2'-fluoroadenosine-3'-phosphate
  modified_base 12: mod_base = OTHER; note = 2'-O-methyluridine-3'-phosphate
  modified_base 13: mod_base = OTHER; note = 2'-O-methyladenosine-3'-phosphate
  modified_base 14: mod_base = OTHER; note = 2'-O-methyluridine-3'-phosphate
  modified_base 15: mod_base = OTHER; note = 2'-O-methyluridine-3'-phosphate
  modified_base 16: mod_base = OTHER; note = 2'-O-methylcytidine-3'-phosphate
  modified_base 17: mod_base = OTHER; note = 2'-O-methylcytidine-3'-phosphate
  modified_base 18: mod_base = OTHER; note = 2'-O-methyladenosine-3'-phosphate
  modified_base 19: mod_base = OTHER; note = 2'-O-methyladenosine-3'-phosphate
  modified_base 20: mod_base = OTHER; note = 2'-O-methyladenosine-3'-phosphate
  modified_base 21: mod_base = OTHER; note = 2'-O-methyluridine-3'-phosphate ((2S,4R)-1-[29-[[2-(acetylamino)-2-deoxy-beta-D-galactopyra nosyl]oxy]-14,14-bis[[3-[[3-[[5-[[2-(acetylamino)-2-deoxy-b eta-D-galactopyranosyl]oxy]-1-oxopentyl]amino]propyl]amino] -3-oxopropoxy]methyl]-1,12,19,25-tetraoxo-16-oxa-13,20,24-t riazanonacos-1-yl]-4-hydroxy-2-pyrrolidinyl)methyl ester
ttcggttttcatattccaaat

SEQ ID NO: 327 - RNA, 21 nt, synthetic construct
  source 1..21: mol_type = other RNA
  modified_base 1: mod_base = OTHER; note = 2'-O-methyladenosine-3'-phosphorothioate
  modified_base 2: mod_base = OTHER; note = 2'-O-methyladenosine-3'-phosphorothioate
  modified_base 3: mod_base = OTHER; note = 2'-O-methylcytidine-3'-phosphate
  modified_base 4: mod_base = OTHER; note = 2'-O-methyluridine-3'-phosphate
  modified_base 5: mod_base = OTHER; note = 2'-O-methyladenosine-3'-phosphate
  modified_base 6: mod_base = OTHER; note = 2'-O-methyluridine-3'-phosphate
  modified_base 7: mod_base = OTHER; note = 2'-deoxy-2'-fluorouridine-3'-phosphate
  modified_base 8: mod_base = OTHER; note = 2'-O-methyluridine-3'-phosphate
  modified_base 9: mod_base = OTHER; note = 2'-deoxy-2'-fluorouridine-3'-phosphate
  modified_base 10: mod_base = OTHER; note = 2'-deoxy-2'-fluorouridine-3'-phosphate
  modified_base 11: mod_base = OTHER; note = 2'-deoxy-2'-fluoroguanosine-3'-phosphate
  modified_base 12: mod_base = OTHER; note = 2'-O-methyluridine-3'-phosphate
  modified_base 13: mod_base = OTHER; note = 2'-O-methylcytidine-3'-phosphate
  modified_base 14: mod_base = OTHER; note = 2'-O-methyladenosine-3'-phosphate
  modified_base 15: mod_base = OTHER; note = 2'-O-methyluridine-3'-phosphate
  modified_base 16: mod_base = OTHER; note = 2'-O-methyladenosine-3'-phosphate
  modified_base 17: mod_base = OTHER; note = 2'-O-methyluridine-3'-phosphate
  modified_base 18: mod_base = OTHER; note = 2'-O-methyluridine-3'-phosphate
  modified_base 19: mod_base = OTHER; note = 2'-O-methylcytidine-3'-phosphate
  modified_base 20: mod_base = OTHER; note = 2'-O-methyluridine-3'-phosphate
  modified_base 21: mod_base = OTHER; note = 2'-O-methyluridine-3'-phosphate ((2S,4R)-1-[29-[[2-(acetylamino)-2-deoxy-beta-D-galactopyra nosyl]oxy]-14,14-bis[[3-[[3-[[5-[[2-(acetylamino)-2-deoxy-b eta-D-galactopyranosyl]oxy]-1-oxopentyl]amino]propyl]amino] -3-oxopropoxy]methyl]-1,12,19,25-tetraoxo-16-oxa-13,20,24-t riazanonacos-1-yl]-4-hydroxy-2-pyrrolidinyl)methyl ester
aactatttttgtcatattctt

SEQ ID NO: 328 - RNA, 21 nt, synthetic construct
  source 1..21: mol_type = other RNA
  modified_base 1: mod_base = OTHER; note = 2'-O-methyladenosine-3'-phosphorothioate
  modified_base 2: mod_base = OTHER; note = 2'-O-methyluridine-3'-phosphorothioate
  modified_base 3: mod_base = OTHER; note = 2'-O-methyladenosine-3'-phosphate
  modified_base 4: mod_base = OTHER; note = 2'-O-methyluridine-3'-phosphate
  modified_base 5: mod_base = OTHER; note = 2'-O-methyluridine-3'-phosphate
  modified_base 6: mod_base = OTHER; note = 2'-O-methylcytidine-3'-phosphate
  modified_base 7: mod_base = OTHER; note = 2'-deoxy-2'-fluorouridine-3'-phosphate
  modified_base 8: mod_base = OTHER; note = 2'-O-methyluridine-3'-phosphate
  modified_base 9: mod_base = OTHER; note = 2'-deoxy-2'-fluorocytidine-3'-phosphate
  modified_base 10: mod_base = OTHER; note = 2'-deoxy-2'-fluoroadenosine-3'-phosphate
  modified_base 11: mod_base = OTHER; note = 2'-deoxy-2'-fluoroadenosine-3'-phosphate
  modified_base 12: mod_base = OTHER; note = 2'-O-methyladenosine-3'-phosphate
  modified_base 13: mod_base = OTHER; note = 2'-O-methylguanosine-3'-phosphate
  modified_base 14: mod_base = OTHER; note = 2'-O-methyladenosine-3'-phosphate
  modified_base 15: mod_base = OTHER; note = 2'-O-methyladenosine-3'-phosphate
  modified_base 16: mod_base = OTHER; note = 2'-O-methylguanosine-3'-phosphate
  modified_base 17: mod_base = OTHER; note = 2'-O-methylguanosine-3'-phosphate
  modified_base 18: mod_base = OTHER; note = 2'-O-methyladenosine-3'-phosphate
  modified_base 19: mod_base = OTHER; note = 2'-O-methyladenosine-3'-phosphate
  modified_base 20: mod_base = OTHER; note = 2'-O-methyladenosine-3'-phosphate
  modified_base 21: mod_base = OTHER; note = 2'-O-methyluridine-3'-phosphate ((2S,4R)-1-[29-[[2-(acetylamino)-2-deoxy-beta-D-galactopyra nosyl]oxy]-14,14-bis[[3-[[3-[[5-[[2-(acetylamino)-2-deoxy-b eta-D-galactopyranosyl]oxy]-1-oxopentyl]amino]propyl]amino] -3-oxopropoxy]methyl]-1,12,19,25-tetraoxo-16-oxa-13,20,24-t riazanonacos-1-yl]-4-hydroxy-2-pyrrolidinyl)methyl ester
atattcttcaaagaaggaaat

SEQ ID NO: 329 - RNA, 21 nt, synthetic construct
  source 1..21: mol_type = other RNA
  modified_base 1: mod_base = OTHER; note = 2'-O-methyladenosine-3'-phosphorothioate
  modified_base 2: mod_base = OTHER; note = 2'-O-methyluridine-3'-phosphorothioate
  modified_base 3: mod_base = OTHER; note = 2'-O-methylguanosine-3'-phosphate
  modified_base 4: mod_base = OTHER; note = 2'-O-methyluridine-3'-phosphate
  modified_base 5: mod_base = OTHER; note = 2'-O-methyluridine-3'-phosphate
  modified_base 6: mod_base = OTHER; note = 2'-O-methyluridine-3'-phosphate
  modified_base 7: mod_base = OTHER; note = 2'-deoxy-2'-fluorocytidine-3'-phosphate
  modified_base 8: mod_base = OTHER; note = 2'-O-methyluridine-3'-phosphate
  modified_base 9: mod_base = OTHER; note = 2'-deoxy-2'-fluoroguanosine-3'-phosphate
  modified_base 10: mod_base = OTHER; note = 2'-deoxy-2'-fluorocytidine-3'-phosphate
  modified_base 11: mod_base = OTHER; note = 2'-deoxy-2'-fluoroadenosine-3'-phosphate
  modified_base 12: mod_base = OTHER; note = 2'-O-methyluridine-3'-phosphate
  modified_base 13: mod_base = OTHER; note = 2'-O-methylguanosine-3'-phosphate
  modified_base 14: mod_base = OTHER; note = 2'-O-methyluridine-3'-phosphate
  modified_base 15: mod_base = OTHER; note = 2'-O-methylguanosine-3'-phosphate
  modified_base 16: mod_base = OTHER; note = 2'-O-methyladenosine-3'-phosphate
  modified_base 17: mod_base = OTHER; note = 2'-O-methyladenosine-3'-phosphate
  modified_base 18: mod_base = OTHER; note = 2'-O-methyladenosine-3'-phosphate
  modified_base 19: mod_base = OTHER; note = 2'-O-methylguanosine-3'-phosphate
  modified_base 20: mod_base = OTHER; note = 2'-O-methylguanosine-3'-phosphate
  modified_base 21: mod_base = OTHER; note = 2'-O-methyluridine-3'-phosphate ((2S,4R)-1-[29-[[2-(acetylamino)-2-deoxy-beta-D-galactopyra nosyl]oxy]-14,14-bis[[3-[[3-[[5-[[2-(acetylamino)-2-deoxy-b eta-D-galactopyranosyl]oxy]-1-oxopentyl]amino]propyl]amino] -3-oxopropoxy]methyl]-1,12,19,25-tetraoxo-16-oxa-13,20,24-t riazanonacos-1-yl]-4-hydroxy-2-pyrrolidinyl)methyl ester
atgtttctgcatgtgaaaggt

SEQ ID NO: 330 - RNA, 21 nt, synthetic construct
  source 1..21: mol_type = other RNA
  modified_base 1: mod_base = OTHER; note = 2'-O-methyluridine-3'-phosphorothioate
  modified_base 2: mod_base = OTHER; note = 2'-O-methylguanosine-3'-phosphorothioate
  modified_base 3: mod_base = OTHER; note = 2'-O-methyladenosine-3'-phosphate
  modified_base 4: mod_base = OTHER; note = 2'-O-methyladenosine-3'-phosphate
  modified_base 5: mod_base = OTHER; note = 2'-O-methyladenosine-3'-phosphate
  modified_base 6: mod_base = OTHER; note = 2'-O-methylguanosine-3'-phosphate
  modified_base 7: mod_base = OTHER; note = 2'-deoxy-2'-fluoroguanosine-3'-phosphate
  modified_base 8: mod_base = OTHER; note = 2'-O-methyladenosine-3'-phosphate
  modified_base 9: mod_base = OTHER; note = 2'-deoxy-2'-fluoroguanosine-3'-phosphate
  modified_base 10: mod_base = OTHER; note = 2'-deoxy-2'-fluoroadenosine-3'-phosphate
  modified_base 11: mod_base = OTHER; note = 2'-deoxy-2'-fluoroadenosine-3'-phosphate
  modified_base 12: mod_base = OTHER; note = 2'-O-methyladenosine-3'-phosphate
  modified_base 13: mod_base = OTHER; note = 2'-O-methyluridine-3'-phosphate
  modified_base 14: mod_base = OTHER; note = 2'-O-methyluridine-3'-phosphate
  modified_base 15: mod_base = OTHER; note = 2'-O-methylcytidine-3'-phosphate
  modified_base 16: mod_base = OTHER; note = 2'-O-methyladenosine-3'-phosphate
  modified_base 17: mod_base = OTHER; note = 2'-O-methyluridine-3'-phosphate
  modified_base 18: mod_base = OTHER; note = 2'-O-methylcytidine-3'-phosphate
  modified_base 19: mod_base = OTHER; note = 2'-O-methyluridine-3'-phosphate
  modified_base 20: mod_base = OTHER; note = 2'-O-methylguanosine-3'-phosphate
  modified_base 21: mod_base = OTHER; note = 2'-O-methyluridine-3'-phosphate ((2S,4R)-1-[29-[[2-(acetylamino)-2-deoxy-beta-D-galactopyra nosyl]oxy]-14,14-bis[[3-[[3-[[5-[[2-(acetylamino)-2-deoxy-b eta-D-galactopyranosyl]oxy]-1-oxopentyl]amino]propyl]amino] -3-oxopropoxy]methyl]-1,12,19,25-tetraoxo-16-oxa-13,20,24-t riazanonacos-1-yl]-4-hydroxy-2-pyrrolidinyl)methyl ester
tgaaaggagaaattcatctgt

SEQ ID NO: 331 - RNA, 21 nt, synthetic construct
  source 1..21: mol_type = other RNA
  modified_base 1: mod_base = OTHER; note = 2'-O-methyluridine-3'-phosphorothioate
  modified_base 2: mod_base = OTHER; note = 2'-O-methylcytidine-3'-phosphorothioate
  modified_base 3: mod_base = OTHER; note = 2'-O-methyluridine-3'-phosphate
  modified_base 4: mod_base = OTHER; note = 2'-O-methylguanosine-3'-phosphate
  modified_base 5: mod_base = OTHER; note = 2'-O-methylguanosine-3'-phosphate
  modified_base 6: mod_base = OTHER; note = 2'-O-methylguanosine-3'-phosphate
  modified_base 7: mod_base = OTHER; note = 2'-deoxy-2'-fluoroadenosine-3'-phosphate
  modified_base 8: mod_base = OTHER; note = 2'-O-methyladenosine-3'-phosphate
  modified_base 9: mod_base = OTHER; note = 2'-deoxy-2'-fluoroguanosine-3'-phosphate
  modified_base 10: mod_base = OTHER; note = 2'-deoxy-2'-fluoroadenosine-3'-phosphate
  modified_base 11: mod_base = OTHER; note = 2'-deoxy-2'-fluorouridine-3'-phosphate
  modified_base 12: mod_base = OTHER; note = 2'-O-methyluridine-3'-phosphate
  modified_base 13: mod_base = OTHER; note = 2'-O-methyluridine-3'-phosphate
  modified_base 14: mod_base = OTHER; note = 2'-O-methylguanosine-3'-phosphate
  modified_base 15: mod_base = OTHER; note = 2'-O-methyluridine-3'-phosphate
  modified_base 16: mod_base = OTHER; note = 2'-O-methyladenosine-3'-phosphate
  modified_base 17: mod_base = OTHER; note = 2'-O-methyladenosine-3'-phosphate
  modified_base 18: mod_base = OTHER; note = 2'-O-methyluridine-3'-phosphate
  modified_base 19: mod_base = OTHER; note = 2'-O-methylguanosine-3'-phosphate
  modified_base 20: mod_base = OTHER; note = 2'-O-methyladenosine-3'-phosphate
  modified_base 21: mod_base = OTHER; note = 2'-O-methyluridine-3'-phosphate ((2S,4R)-1-[29-[[2-(acetylamino)-2-deoxy-beta-D-galactopyra nosyl]oxy]-14,14-bis[[3-[[3-[[5-[[2-(acetylamino)-2-deoxy-b eta-D-galactopyranosyl]oxy]-1-oxopentyl]amino]propyl]amino] -3-oxopropoxy]methyl]-1,12,19,25-tetraoxo-16-oxa-13,20,24-t riazanonacos-1-yl]-4-hydroxy-2-pyrrolidinyl)methyl ester
tctgggaagatttgtaatgat

SEQ ID NO: 332 - RNA, 21 nt, synthetic construct
  source 1..21: mol_type = other RNA
  modified_base 1: mod_base = OTHER; note = 2'-O-methyluridine-3'-phosphorothioate
  modified_base 2: mod_base = OTHER; note = 2'-O-methylguanosine-3'-phosphorothioate
  modified_base 3: mod_base = OTHER; note = 2'-O-methyluridine-3'-phosphate
  modified_base 4: mod_base = OTHER; note = 2'-O-methyladenosine-3'-phosphate
  modified_base 5: mod_base = OTHER; note = 2'-O-methyladenosine-3'-phosphate
  modified_base 6: mod_base = OTHER; note = 2'-O-methyluridine-3'-phosphate
  modified_base 7: mod_base = OTHER; note = 2'-deoxy-2'-fluoroguanosine-3'-phosphate
  modified_base 8: mod_base = OTHER; note = 2'-O-methyladenosine-3'-phosphate
  modified_base 9: mod_base = OTHER; note = 2'-deoxy-2'-fluoroguanosine-3'-phosphate
  modified_base 10: mod_base = OTHER; note = 2'-deoxy-2'-fluoroadenosine-3'-phosphate
  modified_base 11: mod_base = OTHER; note = 2'-deoxy-2'-fluoroadenosine-3'-phosphate
  modified_base 12: mod_base = OTHER; note = 2'-O-methyladenosine-3'-phosphate
  modified_base 13: mod_base = OTHER; note = 2'-O-methyluridine-3'-phosphate
  modified_base 14: mod_base = OTHER; note = 2'-O-methylcytidine-3'-phosphate
  modified_base 15: mod_base = OTHER; note = 2'-O-methylguanosine-3'-phosphate
  modified_base 16: mod_base = OTHER; note = 2'-O-methylcytidine-3'-phosphate
  modified_base 17: mod_base = OTHER; note = 2'-O-methylguanosine-3'-phosphate
  modified_base 18: mod_base = OTHER; note = 2'-O-methyladenosine-3'-phosphate
  modified_base 19: mod_base = OTHER; note = 2'-O-methyluridine-3'-phosphate
  modified_base 20: mod_base = OTHER; note = 2'-O-methylguanosine-3'-phosphate
  modified_base 21: mod_base = OTHER; note = 2'-O-methyluridine-3'-phosphate ((2S,4R)-1-[29-[[2-(acetylamino)-2-deoxy-beta-D-galactopyra nosyl]oxy]-14,14-bis[[3-[[3-[[5-[[2-(acetylamino)-2-deoxy-b eta-D-galactopyranosyl]oxy]-1-oxopentyl]amino]propyl]amino] -3-oxopropoxy]methyl]-1,12,19,25-tetraoxo-16-oxa-13,20,24-t riazanonacos-1-yl]-4-hydroxy-2-pyrrolidinyl)methyl ester
tgtaatgagaaatcgcgatgt

SEQ ID NO: 333 - RNA, 21 nt, synthetic construct
  source 1..21: mol_type = other RNA
  modified_base 1: mod_base = OTHER; note = 2'-O-methyluridine-3'-phosphorothioate
  modified_base 2: mod_base = OTHER; note = 2'-O-methylcytidine-3'-phosphorothioate
  modified_base 3: mod_base = OTHER; note = 2'-O-methylguanosine-3'-phosphate
  modified_base 4: mod_base = OTHER; note = 2'-O-methylcytidine-3'-phosphate
  modified_base 5: mod_base = OTHER; note = 2'-O-methylguanosine-3'-phosphate
  modified_base 6: mod_base = OTHER; note = 2'-O-methyladenosine-3'-phosphate
  modified_base 7: mod_base = OTHER; note = 2'-deoxy-2'-fluorouridine-3'-phosphate
  modified_base 8: mod_base = OTHER; note = 2'-O-methylguanosine-3'-phosphate
  modified_base 9: mod_base = OTHER; note = 2'-deoxy-2'-fluorouridine-3'-phosphate
  modified_base 10: mod_base = OTHER; note = 2'-deoxy-2'-fluorouridine-3'-phosphate
  modified_base 11: mod_base = OTHER; note = 2'-deoxy-2'-fluoroguanosine-3'-phosphate
  modified_base 12: mod_base = OTHER; note = 2'-O-methyluridine-3'-phosphate
  modified_base 13: mod_base = OTHER; note = 2'-O-methylguanosine-3'-phosphate
  modified_base 14: mod_base = OTHER; note = 2'-O-methylcytidine-3'-phosphate
  modified_base 15: mod_base = OTHER; note = 2'-O-methyluridine-3'-phosphate
  modified_base 16: mod_base = OTHER; note = 2'-O-methylcytidine-3'-phosphate
  modified_base 17: mod_base = OTHER; note = 2'-O-methyladenosine-3'-phosphate
  modified_base 18: mod_base = OTHER; note = 2'-O-methylcytidine-3'-phosphate
  modified_base 19: mod_base = OTHER; note = 2'-O-methyladenosine-3'-phosphate
  modified_base 20: mod_base = OTHER; note = 2'-O-methyladenosine-3'-phosphate
  modified_base 21: mod_base = OTHER; note = 2'-O-methyluridine-3'-phosphate ((2S,4R)-1-[29-[[2-(acetylamino)-2-deoxy-beta-D-galactopyra nosyl]oxy]-14,14-bis[[3-[[3-[[5-[[2-(acetylamino)-2-deoxy-b eta-D-galactopyranosyl]oxy]-1-oxopentyl]amino]propyl]amino] -3-oxopropoxy]methyl]-1,12,19,25-tetraoxo-16-oxa-13,20,24-t riazanonacos-1-yl]-4-hydroxy-2-pyrrolidinyl)methyl ester
tcgcgatgttgtgctcacaat

SEQ ID NO: 334 - RNA, 21 nt, synthetic construct
  source 1..21: mol_type = other RNA
  modified_base 1: mod_base = OTHER; note = 2'-O-methyluridine-3'-phosphorothioate
  modified_base 2: mod_base = OTHER; note = 2'-O-methylcytidine-3'-phosphorothioate
  modified_base 3: mod_base = OTHER; note = 2'-O-methyladenosine-3'-phosphate
  modified_base 4: mod_base = OTHER; note = 2'-O-methylcytidine-3'-phosphate
  modified_base 5: mod_base = OTHER; note = 2'-O-methyladenosine-3'-phosphate
  modified_base 6: mod_base = OTHER; note = 2'-O-methyladenosine-3'-phosphate
  modified_base 7: mod_base = OTHER; note = 2'-deoxy-2'-fluorocytidine-3'-phosphate
  modified_base 8: mod_base = OTHER; note = 2'-O-methyladenosine-3'-phosphate
  modified_base 9: mod_base = OTHER; note = 2'-deoxy-2'-fluoroadenosine-3'-phosphate
  modified_base 10: mod_base = OTHER; note = 2'-deoxy-2'-fluorocytidine-3'-phosphate
  modified_base 11: mod_base = OTHER; note = 2'-deoxy-2'-fluorouridine-3'-phosphate
  modified_base 12: mod_base = OTHER; note = 2'-O-methyluridine-3'-phosphate
  modified_base 13: mod_base = OTHER; note = 2'-O-methyluridine-3'-phosphate
  modified_base 14: mod_base = OTHER; note = 2'-O-methyluridine-3'-phosphate
  modified_base 15: mod_base = OTHER; note = 2'-O-methylguanosine-3'-phosphate
  modified_base 16: mod_base = OTHER; note = 2'-O-methyluridine-3'-phosphate
  modified_base 17: mod_base = OTHER; note = 2'-O-methylguanosine-3'-phosphate
  modified_base 18: mod_base = OTHER; note = 2'-O-methylguanosine-3'-phosphate
  modified_base 19: mod_base = OTHER; note = 2'-O-methyladenosine-3'-phosphate
  modified_base 20: mod_base = OTHER; note = 2'-O-methyluridine-3'-phosphate
  modified_base 21: mod_base = OTHER; note = 2'-O-methyluridine-3'-phosphate ((2S,4R)-1-[29-[[2-(acetylamino)-2-deoxy-beta-D-galactopyra nosyl]oxy]-14,14-bis[[3-[[3-[[5-[[2-(acetylamino)-2-deoxy-b eta-D-galactopyranosyl]oxy]-1-oxopentyl]amino]propyl]amino] -3-oxopropoxy]methyl]-1,12,19,25-tetraoxo-16-oxa-13,20,24-t riazanonacos-1-yl]-4-hydroxy-2-pyrrolidinyl)methyl ester
tcacaacaacttttgtggatt

SEQ ID NO: 335 - RNA, 21 nt, synthetic construct
  source 1..21: mol_type = other RNA
  modified_base 1: mod_base = OTHER; note = 2'-O-methylguanosine-3'-phosphorothioate
  modified_base 2: mod_base = OTHER; note = 2'-O-methyluridine-3'-phosphorothioate
  modified_base 3: mod_base = OTHER; note = 2'-O-methylguanosine-3'-phosphate
  modified_base 4: mod_base = OTHER; note = 2'-O-methylguanosine-3'-phosphate
  modified_base 5: mod_base = OTHER; note = 2'-O-methyladenosine-3'-phosphate
  modified_base 6: mod_base = OTHER; note = 2'-O-methyluridine-3'-phosphate
  modified_base 7: mod_base = OTHER; note = 2'-deoxy-2'-fluoroguanosine-3'-phosphate
  modified_base 8: mod_base = OTHER; note = 2'-O-methyladenosine-3'-phosphate
  modified_base 9: mod_base = OTHER; note = 2'-deoxy-2'-fluorouridine-3'-phosphate
  modified_base 10: mod_base = OTHER; note = 2'-deoxy-2'-fluoroadenosine-3'-phosphate
  modified_base 11: mod_base = OTHER; note = 2'-deoxy-2'-fluorouridine-3'-phosphate
  modified_base 12: mod_base = OTHER; note = 2'-O-methyladenosine-3'-phosphate
  modified_base 13: mod_base = OTHER; note = 2'-O-methyladenosine-3'-phosphate
  modified_base 14: mod_base = OTHER; note = 2'-O-methyladenosine-3'-phosphate
  modified_base 15: mod_base = OTHER; note = 2'-O-methyladenosine-3'-phosphate
  modified_base 16: mod_base = OTHER; note = 2'-O-methylguanosine-3'-phosphate
  modified_base 17: mod_base = OTHER; note = 2'-O-methylcytidine-3'-phosphate
  modified_base 18: mod_base = OTHER; note = 2'-O-methyluridine-3'-phosphate
  modified_base 19: mod_base = OTHER; note = 2'-O-methyluridine-3'-phosphate
  modified_base 20: mod_base = OTHER; note = 2'-O-methyluridine-3'-phosphate
  modified_base 21: mod_base = OTHER; note = 2'-O-methyluridine-3'-phosphate ((2S,4R)-1-[29-[[2-(acetylamino)-2-deoxy-beta-D-galactopyra nosyl]oxy]-14,14-bis[[3-[[3-[[5-[[2-(acetylamino)-2-deoxy-b eta-D-galactopyranosyl]oxy]-1-oxopentyl]amino]propyl]amino] -3-oxopropoxy]methyl]-1,12,19,25-tetraoxo-16-oxa-13,20,24-t riazanonacos-1-yl]-4-hydroxy-2-pyrrolidinyl)methyl ester
gtggatgatataaaagctttt

SEQ ID NO: 336 - RNA, 21 nt, synthetic construct
  source 1..21: mol_type = other RNA
  modified_base 1: mod_base = OTHER; note = 2'-O-methyladenosine-3'-phosphorothioate
  modified_base 2: mod_base = OTHER; note = 2'-O-methyladenosine-3'-phosphorothioate
  modified_base 3: mod_base = OTHER; note = 2'-O-methylguanosine-3'-phosphate
  modified_base 4: mod_base = OTHER; note = 2'-O-methylcytidine-3'-phosphate
  modified_base 5: mod_base = OTHER; note = 2'-O-methyluridine-3'-phosphate
  modified_base 6: mod_base = OTHER; note = 2'-O-methyluridine-3'-phosphate
  modified_base 7: mod_base = OTHER; note = 2'-deoxy-2'-fluorouridine-3'-phosphate
  modified_base 8: mod_base = OTHER; note = 2'-O-methylguanosine-3'-phosphate
  modified_base 9: mod_base = OTHER; note = 2'-deoxy-2'-fluorocytidine-3'-phosphate
  modified_base 10: mod_base = OTHER; note = 2'-deoxy-2'-fluorocytidine-3'-phosphate
  modified_base 11: mod_base = OTHER; note = 2'-deoxy-2'-fluoroadenosine-3'-phosphate
  modified_base 12: mod_base = OTHER; note = 2'-O-methyladenosine-3'-phosphate
  modified_base 13: mod_base = OTHER; note = 2'-O-methylcytidine-3'-phosphate
  modified_base 14: mod_base = OTHER; note = 2'-O-methyluridine-3'-phosphate
  modified_base 15: mod_base = OTHER; note = 2'-O-methyladenosine-3'-phosphate
  modified_base 16: mod_base = OTHER; note = 2'-O-methylcytidine-3'-phosphate
  modified_base 17: mod_base = OTHER; note = 2'-O-methylcytidine-3'-phosphate
  modified_base 18: mod_base = OTHER; note = 2'-O-methyluridine-3'-phosphate
  modified_base 19: mod_base = OTHER; note = 2'-O-methyladenosine-3'-phosphate
  modified_base 20: mod_base = OTHER; note = 2'-O-methyluridine-3'-phosphate
  modified_base 21: mod_base = OTHER; note = 2'-O-methyluridine-3'-phosphate ((2S,4R)-1-[29-[[2-(acetylamino)-2-deoxy-beta-D-galactopyra nosyl]oxy]-14,14-bis[[3-[[3-[[5-[[2-(acetylamino)-2-deoxy-b eta-D-galactopyranosyl]oxy]-1-oxopentyl]amino]propyl]amino] -3-oxopropoxy]methyl]-1,12,19,25-tetraoxo-16-oxa-13,20,24-t riazanonacos-1-yl]-4-hydroxy-2-pyrrolidinyl)methyl ester
aagctttgccaactacctatt

SEQ ID NO: 337 - RNA, 21 nt, synthetic construct
  source 1..21: mol_type = other RNA
  modified_base 1: mod_base = OTHER; note = 2'-O-methyluridine-3'-phosphorothioate
  modified_base 2: mod_base = OTHER; note = 2'-O-methyladenosine-3'-phosphorothioate
  modified_base 3: mod_base = OTHER; note = 2'-O-methylcytidine-3'-phosphate
  modified_base 4: mod_base = OTHER; note = 2'-O-methylcytidine-3'-phosphate
  modified_base 5: mod_base = OTHER; note = 2'-O-methyluridine-3'-phosphate
  modified_base 6: mod_base = OTHER; note = 2'-O-methyladenosine-3'-phosphate
  modified_base 7: mod_base = OTHER; note = 2'-deoxy-2'-fluorouridine-3'-phosphate
  modified_base 8: mod_base = OTHER; note = 2'-O-methylguanosine-3'-phosphate
  modified_base 9: mod_base = OTHER; note = 2'-deoxy-2'-fluoroadenosine-3'-phosphate
  modified_base 10: mod_base = OTHER; note = 2'-deoxy-2'-fluoroadenosine-3'-phosphate
  modified_base 11: mod_base = OTHER; note = 2'-deoxy-2'-fluoroadenosine-3'-phosphate
  modified_base 12: mod_base = OTHER; note = 2'-O-methyladenosine-3'-phosphate
  modified_base 13: mod_base = OTHER; note = 2'-O-methylguanosine-3'-phosphate
  modified_base 14: mod_base = OTHER; note = 2'-O-methylguanosine-3'-phosphate
  modified_base 15: mod_base = OTHER; note = 2'-O-methylguanosine-3'-phosphate
  modified_base 16: mod_base = OTHER; note = 2'-O-methyladenosine-3'-phosphate
  modified_base 17: mod_base = OTHER; note = 2'-O-methylguanosine-3'-phosphate
  modified_base 18: mod_base = OTHER; note = 2'-O-methyladenosine-3'-phosphate
  modified_base 19: mod_base = OTHER; note = 2'-O-methyladenosine-3'-phosphate
  modified_base 20: mod_base = OTHER; note = 2'-O-methyluridine-3'-phosphate
  modified_base 21: mod_base = OTHER; note = 2'-O-methyluridine-3'-phosphate ((2S,4R)-1-[29-[[2-(acetylamino)-2-deoxy-beta-D-galactopyra nosyl]oxy]-14,14-bis[[3-[[3-[[5-[[2-(acetylamino)-2-deoxy-b eta-D-galactopyranosyl]oxy]-1-oxopentyl]amino]propyl]amino] -3-oxopropoxy]methyl]-1,12,19,25-tetraoxo-16-oxa-13,20,24-t riazanonacos-1-yl]-4-hydroxy-2-pyrrolidinyl)methyl ester
tacctatgaaaagggagaatt

SEQ ID NO: 338 - RNA, 21 nt, synthetic construct
  source 1..21: mol_type = other RNA
  modified_base 1: mod_base = OTHER; note = 2'-O-methyluridine-3'-phosphorothioate
  modified_base 2: mod_base = OTHER; note = 2'-O-methyluridine-3'-phosphorothioate
  modified_base 3: mod_base = OTHER; note = 2'-O-methylguanosine-3'-phosphate
  modified_base 4: mod_base = OTHER; note = 2'-O-methylcytidine-3'-phosphate
  modified_base 5: mod_base = OTHER; note = 2'-O-methylcytidine-3'-phosphate
  modified_base 6: mod_base = OTHER; note = 2'-O-methyluridine-3'-phosphate
  modified_base 7: mod_base = OTHER; note = 2'-deoxy-2'-fluorouridine-3'-phosphate
  modified_base 8: mod_base = OTHER; note = 2'-O-methyluridine-3'-phosphate
  modified_base 9: mod_base = OTHER; note = 2'-deoxy-2'-fluorouridine-3'-phosphate
  modified_base 10: mod_base = OTHER; note = 2'-deoxy-2'-fluorouridine-3'-phosphate
  modified_base 11: mod_base = OTHER; note = 2'-deoxy-2'-fluoroguanosine-3'-phosphate
  modified_base 12: mod_base = OTHER; note = 2'-O-methylguanosine-3'-phosphate
  modified_base 13: mod_base = OTHER; note = 2'-O-methyladenosine-3'-phosphate
  modified_base 14: mod_base = OTHER; note = 2'-O-methyladenosine-3'-phosphate
  modified_base 15: mod_base = OTHER; note = 2'-O-methyladenosine-3'-phosphate
  modified_base 16: mod_base = OTHER; note = 2'-O-methylcytidine-3'-phosphate
  modified_base 17: mod_base = OTHER; note = 2'-O-methylcytidine-3'-phosphate
  modified_base 18: mod_base = OTHER; note = 2'-O-methyluridine-3'-phosphate
  modified_base 19: mod_base = OTHER; note = 2'-O-methyladenosine-3'-phosphate
  modified_base 20: mod_base = OTHER; note = 2'-O-methyluridine-3'-phosphate
  modified_base 21: mod_base = OTHER; note = 2'-O-methyluridine-3'-phosphate ((2S,4R)-1-[29-[[2-(acetylamino)-2-deoxy-beta-D-galactopyra nosyl]oxy]-14,14-bis[[3-[[3-[[5-[[2-(acetylamino)-2-deoxy-b eta-D-galactopyranosyl]oxy]-1-oxopentyl]amino]propyl]amino] -3-oxopropoxy]methyl]-1,12,19,25-tetraoxo-16-oxa-13,20,24-t riazanonacos-1-yl]-4-hydroxy-2-pyrrolidinyl)methyl ester
ttgcctttttggaaacctatt

SEQ ID NO: 339 - RNA, 21 nt, synthetic construct
  source 1..21: mol_type = other RNA
  modified_base 1: mod_base = OTHER; note = 2'-O-methylcytidine-3'-phosphorothioate
  modified_base 2: mod_base = OTHER; note = 2'-O-methylcytidine-3'-phosphorothioate
  modified_base 3: mod_base = OTHER; note = 2'-O-methyluridine-3'-phosphate
  modified_base 4: mod_base = OTHER; note = 2'-O-methyladenosine-3'-phosphate
  modified_base 5: mod_base = OTHER; note = 2'-O-methyluridine-3'-phosphate
  modified_base 6: mod_base = OTHER; note = 2'-O-methylguanosine-3'-phosphate
  modified_base 7: mod_base = OTHER; note = 2'-deoxy-2'-fluoroguanosine-3'-phosphate
  modified_base 8: mod_base = OTHER; note = 2'-O-methyladenosine-3'-phosphate
  modified_base 9: mod_base = OTHER; note = 2'-deoxy-2'-fluoroadenosine-3'-phosphate
  modified_base 10: mod_base = OTHER; note = 2'-deoxy-2'-fluorocytidine-3'-phosphate
  modified_base 11: mod_base = OTHER; note = 2'-deoxy-2'-fluorouridine-3'-phosphate
  modified_base 12: mod_base = OTHER; note = 2'-O-methylcytidine-3'-phosphate
  modified_base 13: mod_base = OTHER; note = 2'-O-methyladenosine-3'-phosphate
  modified_base 14: mod_base = OTHER; note = 2'-O-methylcytidine-3'-phosphate
  modified_base 15: mod_base = OTHER; note = 2'-O-methyluridine-3'-phosphate
  modified_base 16: mod_base = OTHER; note = 2'-O-methyladenosine-3'-phosphate
  modified_base 17: mod_base = OTHER; note = 2'-O-methylcytidine-3'-phosphate
  modified_base 18: mod_base = OTHER; note = 2'-O-methyladenosine-3'-phosphate
  modified_base 19: mod_base = OTHER; note = 2'-O-methylguanosine-3'-phosphate
  modified_base 20: mod_base = OTHER; note = 2'-O-methyluridine-3'-phosphate
  modified_base 21: mod_base = OTHER; note = 2'-O-methyluridine-3'-phosphate ((2S,4R)-1-[29-[[2-(acetylamino)-2-deoxy-beta-D-galactopyra nosyl]oxy]-14,14-bis[[3-[[3-[[5-[[2-(acetylamino)-2-deoxy-b eta-D-galactopyranosyl]oxy]-1-oxopentyl]amino]propyl]amino] -3-oxopropoxy]methyl]-1,12,19,25-tetraoxo-16-oxa-13,20,24-t riazanonacos-1-yl]-4-hydroxy-2-pyrrolidinyl)methyl ester
cctatggaactcactacagtt

SEQ ID NO: 340 - RNA, 21 nt, synthetic construct
  source 1..21: mol_type = other RNA
  modified_base 1: mod_base = OTHER; note = 2'-O-methyladenosine-3'-phosphorothioate
  modified_base 2: mod_base = OTHER; note = 2'-O-methylcytidine-3'-phosphorothioate
  modified_base 3: mod_base = OTHER; note = 2'-O-methyluridine-3'-phosphate
  modified_base 4: mod_base = OTHER; note = 2'-O-methyladenosine-3'-phosphate
  modified_base 5: mod_base = OTHER; note = 2'-O-methylcytidine-3'-phosphate
  modified_base 6: mod_base = OTHER; note = 2'-O-methyladenosine-3'-phosphate
  modified_base 7: mod_base = OTHER; note = 2'-deoxy-2'-fluoroguanosine-3'-phosphate
  modified_base 8: mod_base = OTHER; note = 2'-O-methyluridine-3'-phosphate
  modified_base 9: mod_base = OTHER; note = 2'-deoxy-2'-fluoroadenosine-3'-phosphate
  modified_base 10: mod_base = OTHER; note = 2'-deoxy-2'-fluoroguanosine-3'-phosphate
  modified_base 11: mod_base = OTHER; note = 2'-deoxy-2'-fluorocytidine-3'-phosphate
  modified_base 12: mod_base = OTHER; note = 2'-O-methyluridine-3'-phosphate
  modified_base 13: mod_base = OTHER; note = 2'-O-methylcytidine-3'-phosphate
  modified_base 14: mod_base = OTHER; note = 2'-O-methyluridine-3'-phosphate
  modified_base 15: mod_base = OTHER; note = 2'-O-methylguanosine-3'-phosphate
  modified_base 16: mod_base = OTHER; note = 2'-O-methylguanosine-3'-phosphate
  modified_base 17: mod_base = OTHER; note = 2'-O-methylguanosine-3'-phosphate
  modified_base 18: mod_base = OTHER; note = 2'-O-methyluridine-3'-phosphate
  modified_base 19: mod_base = OTHER; note = 2'-O-methylcytidine-3'-phosphate
  modified_base 20: mod_base = OTHER; note = 2'-O-methyluridine-3'-phosphate
  modified_base 21: mod_base = OTHER; note = 2'-O-methyluridine-3'-phosphate ((2S,4R)-1-[29-[[2-(acetylamino)-2-deoxy-beta-D-galactopyra nosyl]oxy]-14,14-bis[[3-[[3-[[5-[[2-(acetylamino)-2-deoxy-b eta-D-galactopyranosyl]oxy]-1-oxopentyl]amino]propyl]amino] -3-oxopropoxy]methyl]-1,12,19,25-tetraoxo-16-oxa-13,20,24-t riazanonacos-1-yl]-4-hydroxy-2-pyrrolidinyl)methyl ester
actacagtagctctgggtctt

SEQ ID NO: 341 - RNA, 21 nt, synthetic construct
  source 1..21: mol_type = other RNA
  modified_base 1: mod_base = OTHER; note = 2'-O-methylcytidine-3'-phosphorothioate
  modified_base 2: mod_base = OTHER; note = 2'-O-methyluridine-3'-phosphorothioate
  modified_base 3: mod_base = OTHER; note = 2'-O-methylguanosine-3'-phosphate
  modified_base 4: mod_base = OTHER; note = 2'-O-methylguanosine-3'-phosphate
  modified_base 5: mod_base = OTHER; note = 2'-O-methylguanosine-3'-phosphate
  modified_base 6: mod_base = OTHER; note = 2'-O-methyluridine-3'-phosphate
  modified_base 7: mod_base = OTHER; note = 2'-deoxy-2'-fluorocytidine-3'-phosphate
  modified_base 8: mod_base = OTHER; note = 2'-O-methyluridine-3'-phosphate
  modified_base 9: mod_base = OTHER; note = 2'-deoxy-2'-fluorocytidine-3'-phosphate
  modified_base 10: mod_base = OTHER; note = 2'-deoxy-2'-fluorouridine-3'-phosphate
  modified_base 11: mod_base = OTHER; note = 2'-deoxy-2'-fluoroadenosine-3'-phosphate
  modified_base 12: mod_base = OTHER; note = 2'-O-methylguanosine-3'-phosphate
  modified_base 13: mod_base = OTHER; note = 2'-O-methylguanosine-3'-phosphate
  modified_base 14: mod_base = OTHER; note = 2'-O-methyladenosine-3'-phosphate
  modified_base 15: mod_base = OTHER; note = 2'-O-methylguanosine-3'-phosphate
  modified_base 16: mod_base = OTHER; note = 2'-O-methylguanosine-3'-phosphate
  modified_base 17: mod_base = OTHER; note = 2'-O-methyladenosine-3'-phosphate
  modified_base 18: mod_base = OTHER; note = 2'-O-methylcytidine-3'-phosphate
  modified_base 19: mod_base = OTHER; note = 2'-O-methyluridine-3'-phosphate
  modified_base 20: mod_base = OTHER; note = 2'-O-methylcytidine-3'-phosphate
  modified_base 21: mod_base = OTHER; note = 2'-O-methyluridine-3'-phosphate ((2S,4R)-1-[29-[[2-(acetylamino)-2-deoxy-beta-D-galactopyra nosyl]oxy]-14,14-bis[[3-[[3-[[5-[[2-(acetylamino)-2-deoxy-b eta-D-galactopyranosyl]oxy]-1-oxopentyl]amino]propyl]amino] -3-oxopropoxy]methyl]-1,12,19,25-tetraoxo-16-oxa-13,20,24-t riazanonacos-1-yl]-4-hydroxy-2-pyrrolidinyl)methyl ester
ctgggtctctaggaggactct

SEQ ID NO: 342 - RNA, 21 nt, synthetic construct
  source 1..21: mol_type = other RNA
  modified_base 1: mod_base = OTHER; note = 2'-O-methylcytidine-3'-phosphorothioate
  modified_base 2: mod_base = OTHER; note = 2'-O-methyluridine-3'-phosphorothioate
  modified_base 3: mod_base = OTHER; note = 2'-O-methylcytidine-3'-phosphate
  modified_base 4: mod_base = OTHER; note = 2'-O-methyluridine-3'-phosphate
  modified_base 5: mod_base = OTHER; note = 2'-O-methyladenosine-3'-phosphate
  modified_base 6: mod_base = OTHER; note = 2'-O-methyluridine-3'-phosphate
  modified_base 7: mod_base = OTHER; note = 2'-deoxy-2'-fluoroguanosine-3'-phosphate
  modified_base 8: mod_base = OTHER; note = 2'-O-methyladenosine-3'-phosphate
  modified_base 9: mod_base = OTHER; note = 2'-deoxy-2'-fluoroadenosine-3'-phosphate
  modified_base 10: mod_base = OTHER; note = 2'-deoxy-2'-fluorocytidine-3'-phosphate
  modified_base 11: mod_base = OTHER; note = 2'-deoxy-2'-fluorouridine-3'-phosphate
  modified_base 12: mod_base = OTHER; note = 2'-O-methyladenosine-3'-phosphate
  modified_base 13: mod_base = OTHER; note = 2'-O-methyladenosine-3'-phosphate
  modified_base 14: mod_base = OTHER; note = 2'-O-methyluridine-3'-phosphate
  modified_base 15: mod_base = OTHER; note = 2'-O-methyladenosine-3'-phosphate
  modified_base 16: mod_base = OTHER; note = 2'-O-methyluridine-3'-phosphate
  modified_base 17: mod_base = OTHER; note = 2'-O-methyladenosine-3'-phosphate
  modified_base 18: mod_base = OTHER; note = 2'-O-methyluridine-3'-phosphate
  modified_base 19: mod_base = OTHER; note = 2'-O-methylguanosine-3'-phosphate
  modified_base 20: mod_base = OTHER; note = 2'-O-methyluridine-3'-phosphate
  modified_base 21: mod_base = OTHER; note = 2'-O-methyluridine-3'-phosphate ((2S,4R)-1-[29-[[2-(acetylamino)-2-deoxy-beta-D-galactopyra nosyl]oxy]-14,14-bis[[3-[[3-[[5-[[2-(acetylamino)-2-deoxy-b eta-D-galactopyranosyl]oxy]-1-oxopentyl]amino]propyl]amino] -3-oxopropoxy]methyl]-1,12,19,25-tetraoxo-16-oxa-13,20,24-t riazanonacos-1-yl]-4-hydroxy-2-pyrrolidinyl)methyl ester
ctctatgaactaatatatgtt

SEQ ID NO: 343 - RNA, 21 nt, synthetic construct
  source 1..21: mol_type = other RNA
  modified_base 1: mod_base = OTHER; note = 2'-O-methyluridine-3'-phosphorothioate
  modified_base 2: mod_base = OTHER; note = 2'-O-methylguanosine-3'-phosphorothioate
  modified_base 3: mod_base = OTHER; note = 2'-O-methylguanosine-3'-phosphate
  modified_base 4: mod_base = OTHER; note = 2'-O-methyladenosine-3'-phosphate
  modified_base 5: mod_base = OTHER; note = 2'-O-methyluridine-3'-phosphate
  modified_base 6: mod_base = OTHER; note = 2'-O-methyladenosine-3'-phosphate
  modified_base 7: mod_base = OTHER; note = 2'-deoxy-2'-fluoroadenosine-3'-phosphate
  modified_base 8: mod_base = OTHER; note = 2'-O-methyladenosine-3'-phosphate
  modified_base 9: mod_base = OTHER; note = 2'-deoxy-2'-fluoroguanosine-3'-phosphate
  modified_base 10: mod_base = OTHER; note = 2'-deoxy-2'-fluorocytidine-3'-phosphate
  modified_base 11: mod_base = OTHER; note = 2'-deoxy-2'-fluorouridine-3'-phosphate
  modified_base 12: mod_base = OTHER; note = 2'-O-methyluridine-3'-phosphate
  modified_base 13: mod_base = OTHER; note = 2'-O-methylcytidine-3'-phosphate
  modified_base 14: mod_base = OTHER; note = 2'-O-methylcytidine-3'-phosphate
  modified_base 15: mod_base = OTHER; note = 2'-O-methyladenosine-3'-phosphate
  modified_base 16: mod_base = OTHER; note = 2'-O-methyluridine-3'-phosphate
  modified_base 17: mod_base = OTHER; note = 2'-O-methylguanosine-3'-phosphate
  modified_base 18: mod_base = OTHER; note = 2'-O-methyladenosine-3'-phosphate
  modified_base 19: mod_base = OTHER; note = 2'-O-methyladenosine-3'-phosphate
  modified_base 20: mod_base = OTHER; note = 2'-O-methylguanosine-3'-phosphate
  modified_base 21: mod_base = OTHER; note = 2'-O-methyluridine-3'-phosphate ((2S,4R)-1-[29-[[2-(acetylamino)-2-deoxy-beta-D-galactopyra nosyl]oxy]-14,14-bis[[3-[[3-[[5-[[2-(acetylamino)-2-deoxy-b eta-D-galactopyranosyl]oxy]-1-oxopentyl]amino]propyl]amino] -3-oxopropoxy]methyl]-1,12,19,25-tetraoxo-16-oxa-13,20,24-t riazanonacos-1-yl]-4-hydroxy-2-pyrrolidinyl)methyl ester
tggataaagcttccatgaagt

SEQ ID NO: 344 - RNA, 21 nt, synthetic construct
  source 1..21: mol_type = other RNA
  modified_base 1: mod_base = OTHER; note = 2'-O-methyladenosine-3'-phosphorothioate
  modified_base 2: mod_base = OTHER; note = 2'-O-methyladenosine-3'-phosphorothioate
  modified_base 3: mod_base = OTHER; note = 2'-O-methylguanosine-3'-phosphate
  modified_base 4: mod_base = OTHER; note = 2'-O-methylcytidine-3'-phosphate
  modified_base 5: mod_base = OTHER; note = 2'-O-methylguanosine-3'-phosphate
  modified_base 6: mod_base = OTHER; note = 2'-O-methylguanosine-3'-phosphate
  modified_base 7: mod_base = OTHER; note = 2'-deoxy-2'-fluoroadenosine-3'-phosphate
  modified_base 8: mod_base = OTHER; note = 2'-O-methyladenosine-3'-phosphate
  modified_base 9: mod_base = OTHER; note = 2'-deoxy-2'-fluoroadenosine-3'-phosphate
  modified_base 10: mod_base = OTHER; note = 2'-deoxy-2'-fluoroguanosine-3'-phosphate
  modified_base 11: mod_base = OTHER; note = 2'-deoxy-2'-fluoroguanosine-3'-phosphate
  modified_base 12: mod_base = OTHER; note = 2'-O-methyluridine-3'-phosphate
  modified_base 13: mod_base = OTHER; note = 2'-O-methylguanosine-3'-phosphate
  modified_base 14: mod_base = OTHER; note = 2'-O-methyluridine-3'-phosphate
  modified_base 15: mod_base = OTHER; note = 2'-O-methyluridine-3'-phosphate
  modified_base 16: mod_base = OTHER; note = 2'-O-methylguanosine-3'-phosphate
  modified_base 17: mod_base = OTHER; note = 2'-O-methyladenosine-3'-phosphate
  modified_base 18: mod_base = OTHER; note = 2'-O-methyladenosine-3'-phosphate
  modified_base 19: mod_base = OTHER; note = 2'-O-methylcytidine-3'-phosphate
  modified_base 20: mod_base = OTHER; note = 2'-O-methyluridine-3'-phosphate
  modified_base 21: mod_base = OTHER; note = 2'-O-methyluridine-3'-phosphate ((2S,4R)-1-[29-[[2-(acetylamino)-2-deoxy-beta-D-galactopyra nosyl]oxy]-14,14-bis[[3-[[3-[[5-[[2-(acetylamino)-2-deoxy-b eta-D-galactopyranosyl]oxy]-1-oxopentyl]amino]propyl]amino] -3-oxopropoxy]methyl]-1,12,19,25-tetraoxo-16-oxa-13,20,24-t riazanonacos-1-yl]-4-hydroxy-2-pyrrolidinyl)methyl ester
aagcggaaaggtgttgaactt

SEQ ID NO: 345 - RNA, 21 nt, synthetic construct
  source 1..21: mol_type = other RNA
  modified_base 1: mod_base = OTHER; note = 2'-O-methylguanosine-3'-phosphorothioate
  modified_base 2: mod_base = OTHER; note = 2'-O-methyluridine-3'-phosphorothioate
  modified_base 3: mod_base = OTHER; note = 2'-O-methyluridine-3'-phosphate
  modified_base 4: mod_base = OTHER; note = 2'-O-methylguanosine-3'-phosphate
  modified_base 5: mod_base = OTHER; note = 2'-O-methyladenosine-3'-phosphate
  modified_base 6: mod_base = OTHER; note = 2'-O-methyladenosine-3'-phosphate
  modified_base 7: mod_base = OTHER; note = 2'-deoxy-2'-fluorocytidine-3'-phosphate
  modified_base 8: mod_base = OTHER; note = 2'-O-methyluridine-3'-phosphate
  modified_base 9: mod_base = OTHER; note = 2'-deoxy-2'-fluoroadenosine-3'-phosphate
  modified_base 10: mod_base = OTHER; note = 2'-deoxy-2'-fluoroadenosine-3'-phosphate
  modified_base 11: mod_base = OTHER; note = 2'-deoxy-2'-fluoroadenosine-3'-phosphate
  modified_base 12: mod_base = OTHER; note = 2'-O-methyladenosine-3'-phosphate
  modified_base 13: mod_base = OTHER; note = 2'-O-methylguanosine-3'-phosphate
  modified_base 14: mod_base = OTHER; note = 2'-O-methyladenosine-3'-phosphate
  modified_base 15: mod_base = OTHER; note = 2'-O-methylcytidine-3'-phosphate
  modified_base 16: mod_base = OTHER; note = 2'-O-methyladenosine-3'-phosphate
  modified_base 17: mod_base = OTHER; note = 2'-O-methyluridine-3'-phosphate
  modified_base 18: mod_base = OTHER; note = 2'-O-methyladenosine-3'-phosphate
  modified_base 19: mod_base = OTHER; note = 2'-O-methyladenosine-3'-phosphate
  modified_base 20: mod_base = OTHER; note = 2'-O-methyladenosine-3'-phosphate
  modified_base 21: mod_base = OTHER; note = 2'-O-methyluridine-3'-phosphate ((2S,4R)-1-[29-[[2-(acetylamino)-2-deoxy-beta-D-galactopyra nosyl]oxy]-14,14-bis[[3-[[3-[[5-[[2-(acetylamino)-2-deoxy-b eta-D-galactopyranosyl]oxy]-1-oxopentyl]amino]propyl]amino] -3-oxopropoxy]methyl]-1,12,19,25-tetraoxo-16-oxa-13,20,24-t riazanonacos-1-yl]-4-hydroxy-2-pyrrolidinyl)methyl ester
gttgaactaaaagacataaat

SEQ ID NO: 346 - RNA, 21 nt, synthetic construct
  source 1..21: mol_type = other RNA
  modified_base 1: mod_base = OTHER; note = 2'-O-methyluridine-3'-phosphorothioate
  modified_base 2: mod_base = OTHER; note = 2'-O-methyladenosine-3'-phosphorothioate
  modified_base 3: mod_base = OTHER; note = 2'-O-methyladenosine-3'-phosphate
  modified_base 4: mod_base = OTHER; note = 2'-O-methyladenosine-3'-phosphate
  modified_base 5: mod_base = OTHER; note = 2'-O-methylguanosine-3'-phosphate
  modified_base 6: mod_base = OTHER; note = 2'-O-methyladenosine-3'-phosphate
  modified_base 7: mod_base = OTHER; note = 2'-deoxy-2'-fluoroguanosine-3'-phosphate
  modified_base 8: mod_base = OTHER; note = 2'-O-methyladenosine-3'-phosphate
  modified_base 9: mod_base = OTHER; note = 2'-deoxy-2'-fluorouridine-3'-phosphate
  modified_base 10: mod_base = OTHER; note = 2'-deoxy-2'-fluoroguanosine-3'-phosphate
  modified_base 11: mod_base = OTHER; note = 2'-deoxy-2'-fluorocytidine-3'-phosphate
  modified_base 12: mod_base = OTHER; note = 2'-O-methylcytidine-3'-phosphate
  modified_base 13: mod_base = OTHER; note = 2'-O-methyluridine-3'-phosphate
  modified_base 14: mod_base = OTHER; note = 2'-O-methyluridine-3'-phosphate
  modified_base 15: mod_base = OTHER; note = 2'-O-methylguanosine-3'-phosphate
  modified_base 16: mod_base = OTHER; note = 2'-O-methylguanosine-3'-phosphate
  modified_base 17: mod_base = OTHER; note = 2'-O-methylguanosine-3'-phosphate
  modified_base 18: mod_base = OTHER; note = 2'-O-methyluridine-3'-phosphate
  modified_base 19: mod_base = OTHER; note = 2'-O-methyladenosine-3'-phosphate
  modified_base 20: mod_base = OTHER; note = 2'-O-methyluridine-3'-phosphate
  modified_base 21: mod_base = OTHER; note = 2'-O-methyluridine-3'-phosphate ((2S,4R)-1-[29-[[2-(acetylamino)-2-deoxy-beta-D-galactopyra nosyl]oxy]-14,14-bis[[3-[[3-[[5-[[2-(acetylamino)-2-deoxy-b eta-D-galactopyranosyl]oxy]-1-oxopentyl]amino]propyl]amino] -3-oxopropoxy]methyl]-1,12,19,25-tetraoxo-16-oxa-13,20,24-t riazanonacos-1-yl]-4-hydroxy-2-pyrrolidinyl)methyl ester
taaagagatgccttgggtatt

SEQ ID NO: 347 - RNA, 21 nt, synthetic construct
  source 1..21: mol_type = other RNA
  modified_base 1: mod_base = OTHER; note = 2'-O-methyluridine-3'-phosphorothioate
  modified_base 2: mod_base = OTHER; note = 2'-O-methyladenosine-3'-phosphorothioate
  modified_base 3: mod_base = OTHER; note = 2'-O-methyluridine-3'-phosphate
  modified_base 4: mod_base = OTHER; note = 2'-O-methylcytidine-3'-phosphate
  modified_base 5: mod_base = OTHER; note = 2'-O-methyladenosine-3'-phosphate
  modified_base 6: mod_base = OTHER; note = 2'-O-methyluridine-3'-phosphate
  modified_base 7: mod_base = OTHER; note = 2'-deoxy-2'-fluorocytidine-3'-phosphate
  modified_base 8: mod_base = OTHER; note = 2'-O-methyluridine-3'-phosphate
  modified_base 9: mod_base = OTHER; note = 2'-deoxy-2'-fluoroguanosine-3'-phosphate
  modified_base 10: mod_base = OTHER; note = 2'-deoxy-2'-fluoroguanosine-3'-phosphate
  modified_base 11: mod_base = OTHER; note = 2'-deoxy-2'-fluoroadenosine-3'-phosphate
  modified_base 12: mod_base = OTHER; note = 2'-O-methyluridine-3'-phosphate
  modified_base 13: mod_base = OTHER; note = 2'-O-methylguanosine-3'-phosphate
  modified_base 14: mod_base = OTHER; note = 2'-O-methyluridine-3'-phosphate
  modified_base 15: mod_base = OTHER; note = 2'-O-methyladenosine-3'-phosphate
  modified_base 16: mod_base = OTHER; note = 2'-O-methyluridine-3'-phosphate
  modified_base 17: mod_base = OTHER; note = 2'-O-methylcytidine-3'-phosphate
  modified_base 18: mod_base = OTHER; note = 2'-O-methyluridine-3'-phosphate
  modified_base 19: mod_base = OTHER; note = 2'-O-methylcytidine-3'-phosphate
  modified_base 20: mod_base = OTHER; note = 2'-O-methyluridine-3'-phosphate
  modified_base 21: mod_base = OTHER; note = 2'-O-methyluridine-3'-phosphate ((2S,4R)-1-[29-[[2-(acetylamino)-2-deoxy-beta-D-galactopyra nosyl]oxy]-14,14-bis[[3-[[3-[[5-[[2-(acetylamino)-2-deoxy-b eta-D-galactopyranosyl]oxy]-1-oxopentyl]amino]propyl]amino] -3-oxopropoxy]methyl]-1,12,19,25-tetraoxo-16-oxa-13,20,24-t riazanonacos-1-yl]-4-hydroxy-2-pyrrolidinyl)methyl ester
tatcatctggatgtatctctt

SEQ ID NO: 348 - RNA, 21 nt, synthetic construct
  source 1..21: mol_type = other RNA
  modified_base 1: mod_base = OTHER; note = 2'-O-methyluridine-3'-phosphorothioate
  modified_base 2: mod_base = OTHER; note = 2'-O-methyladenosine-3'-phosphorothioate
  modified_base 3: mod_base = OTHER; note = 2'-O-methyluridine-3'-phosphate
  modified_base 4: mod_base = OTHER; note = 2'-O-methylcytidine-3'-phosphate
  modified_base 5: mod_base = OTHER; note = 2'-O-methyluridine-3'-phosphate
  modified_base 6: mod_base = OTHER; note = 2'-O-methylcytidine-3'-phosphate
  modified_base 7: mod_base = OTHER; note = 2'-deoxy-2'-fluorouridine-3'-phosphate
  modified_base 8: mod_base = OTHER; note = 2'-O-methylguanosine-3'-phosphate
  modified_base 9: mod_base = OTHER; note = 2'-deoxy-2'-fluoroguanosine-3'-phosphate
  modified_base 10: mod_base = OTHER; note = 2'-deoxy-2'-fluorocytidine-3'-phosphate
  modified_base 11: mod_base = OTHER; note = 2'-deoxy-2'-fluorouridine-3'-phosphate
  modified_base 12: mod_base = OTHER; note = 2'-O-methyluridine-3'-phosphate
  modified_base 13: mod_base = OTHER; note = 2'-O-methyluridine-3'-phosphate
  modified_base 14: mod_base = OTHER; note = 2'-O-methylcytidine-3'-phosphate
  modified_base 15: mod_base = OTHER; note = 2'-O-methyluridine-3'-phosphate
  modified_base 16: mod_base = OTHER; note = 2'-O-methylcytidine-3'-phosphate
  modified_base 17: mod_base = OTHER; note = 2'-O-methyluridine-3'-phosphate
  modified_base 18: mod_base = OTHER; note = 2'-O-methylguanosine-3'-phosphate
  modified_base 19: mod_base = OTHER; note = 2'-O-methyladenosine-3'-phosphate
  modified_base 20: mod_base = OTHER; note = 2'-O-methyladenosine-3'-phosphate
  modified_base 21: mod_base = OTHER; note = 2'-O-methyluridine-3'-phosphate ((2S,4R)-1-[29-[[2-(acetylamino)-2-deoxy-beta-D-galactopyra nosyl]oxy]-14,14-bis[[3-[[3-[[5-[[2-(acetylamino)-2-deoxy-b eta-D-galactopyranosyl]oxy]-1-oxopentyl]amino]propyl]amino] -3-oxopropoxy]methyl]-1,12,19,25-tetraoxo-16-oxa-13,20,24-t riazanonacos-1-yl]-4-hydroxy-2-pyrrolidinyl)methyl ester
tatctctggctttctctgaat

SEQ ID NO: 349 - RNA, 21 nt, synthetic construct
  source 1..21: mol_type = other RNA
  modified_base 1: mod_base = OTHER; note = 2'-O-methyluridine-3'-phosphorothioate
  modified_base 2: mod_base = OTHER; note = 2'-O-methylcytidine-3'-phosphorothioate
  modified_base 3: mod_base = OTHER; note = 2'-O-methyluridine-3'-phosphate
  modified_base 4: mod_base = OTHER; note = 2'-O-methylcytidine-3'-phosphate
  modified_base 5: mod_base = OTHER; note = 2'-O-methyluridine-3'-phosphate
  modified_base 6: mod_base = OTHER; note = 2'-O-methylguanosine-3'-phosphate
  modified_base 7: mod_base = OTHER; note = 2'-deoxy-2'-fluoroadenosine-3'-phosphate
  modified_base 8: mod_base = OTHER; note = 2'-O-methyladenosine-3'-phosphate
  modified_base 9: mod_base = OTHER; note = 2'-deoxy-2'-fluoroadenosine-3'-phosphate
  modified_base 10: mod_base = OTHER; note = 2'-deoxy-2'-fluorouridine-3'-phosphate
  modified_base 11: mod_base = OTHER; note = 2'-deoxy-2'-fluorocytidine-3'-phosphate
  modified_base 12: mod_base = OTHER; note = 2'-O-methyluridine-3'-phosphate
  modified_base 13: mod_base = OTHER; note = 2'-O-methylcytidine-3'-phosphate
  modified_base 14: mod_base = OTHER; note = 2'-O-methyluridine-3'-phosphate
  modified_base 15: mod_base = OTHER; note = 2'-O-methylguanosine-3'-phosphate
  modified_base 16: mod_base = OTHER; note = 2'-O-methyluridine-3'-phosphate
  modified_base 17: mod_base = OTHER; note = 2'-O-methyluridine-3'-phosphate
  modified_base 18: mod_base = OTHER; note = 2'-O-methylguanosine-3'-phosphate
  modified_base 19: mod_base = OTHER; note = 2'-O-methylguanosine-3'-phosphate
  modified_base 20: mod_base = OTHER; note = 2'-O-methyladenosine-3'-phosphate
  modified_base 21: mod_base = OTHER; note = 2'-O-methyluridine-3'-phosphate ((2S,4R)-1-[29-[[2-(acetylamino)-2-deoxy-beta-D-galactopyra nosyl]oxy]-14,14-bis[[3-[[3-[[5-[[2-(acetylamino)-2-deoxy-b eta-D-galactopyranosyl]oxy]-1-oxopentyl]amino]propyl]amino] -3-oxopropoxy]methyl]-1,12,19,25-tetraoxo-16-oxa-13,20,24-t riazanonacos-1-yl]-4-hydroxy-2-pyrrolidinyl)methyl ester
tctctgaaatctctgttggat

SEQ ID NO: 350 - RNA, 21 nt, synthetic construct
  source 1..21: mol_type = other RNA
  modified_base 1: mod_base = OTHER; note = 2'-O-methylguanosine-3'-phosphorothioate
  modified_base 2: mod_base = OTHER; note = 2'-O-methylguanosine-3'-phosphorothioate
  modified_base 3: mod_base = OTHER; note = 2'-O-methyladenosine-3'-phosphate
  modified_base 4: mod_base = OTHER; note = 2'-O-methylguanosine-3'-phosphate
  modified_base 5: mod_base = OTHER; note = 2'-O-methylcytidine-3'-phosphate
  modified_base 6: mod_base = OTHER; note = 2'-O-methyluridine-3'-phosphate
  modified_base 7: mod_base = OTHER; note = 2'-deoxy-2'-fluoroguanosine-3'-phosphate
  modified_base 8: mod_base = OTHER; note = 2'-O-methyladenosine-3'-phosphate
  modified_base 9: mod_base = OTHER; note = 2'-deoxy-2'-fluoroadenosine-3'-phosphate
  modified_base 10: mod_base = OTHER; note = 2'-deoxy-2'-fluorouridine-3'-phosphate
  modified_base 11: mod_base = OTHER; note = 2'-deoxy-2'-fluorouridine-3'-phosphate
  modified_base 12: mod_base = OTHER; note = 2'-O-methyluridine-3'-phosphate
  modified_base 13: mod_base = OTHER; note = 2'-O-methyladenosine-3'-phosphate
  modified_base 14: mod_base = OTHER; note = 2'-O-methyladenosine-3'-phosphate
  modified_base 15: mod_base = OTHER; note = 2'-O-methyluridine-3'-phosphate
  modified_base 16: mod_base = OTHER; note = 2'-O-methyladenosine-3'-phosphate
  modified_base 17: mod_base = OTHER; note = 2'-O-methyladenosine-3'-phosphate
  modified_base 18: mod_base = OTHER; note = 2'-O-methyladenosine-3'-phosphate
  modified_base 19: mod_base = OTHER; note = 2'-O-methylguanosine-3'-phosphate
  modified_base 20: mod_base = OTHER; note = 2'-O-methyladenosine-3'-phosphate
  modified_base 21: mod_base = OTHER; note = 2'-O-methyluridine-3'-phosphate ((2S,4R)-1-[29-[[2-(acetylamino)-2-deoxy-beta-D-galactopyra nosyl]oxy]-14,14-bis[[3-[[3-[[5-[[2-(acetylamino)-2-deoxy-b eta-D-galactopyranosyl]oxy]-1-oxopentyl]amino]propyl]amino] -3-oxopropoxy]methyl]-1,12,19,25-tetraoxo-16-oxa-13,20,24-t riazanonacos-1-yl]-4-hydroxy-2-pyrrolidinyl)methyl ester
ggagctgaatttaataaagat

SEQ ID NO: 351 - RNA, 21 nt, synthetic construct
  source 1..21: mol_type = other RNA
  modified_base 1: mod_base = OTHER; note = 2'-O-methyladenosine-3'-phosphorothioate
  modified_base 2: mod_base = OTHER; note = 2'-O-methyladenosine-3'-phosphorothioate
  modified_base 3: mod_base = OTHER; note = 2'-O-methylguanosine-3'-phosphate
  modified_base 4: mod_base = OTHER; note = 2'-O-methyladenosine-3'-phosphate
  modified_base 5: mod_base = OTHER; note = 2'-O-methyluridine-3'-phosphate
  modified_base 6: mod_base = OTHER; note = 2'-O-methylguanosine-3'-phosphate
  modified_base 7: mod_base = OTHER; note = 2'-deoxy-2'-fluoroadenosine-3'-phosphate
  modified_base 8: mod_base = OTHER; note = 2'-O-methyluridine-3'-phosphate
  modified_base 9: mod_base = OTHER; note = 2'-deoxy-2'-fluorouridine-3'-phosphate
  modified_base 10: mod_base = OTHER; note = 2'-deoxy-2'-fluoroguanosine-3'-phosphate
  modified_base 11: mod_base = OTHER; note = 2'-deoxy-2'-fluorouridine-3'-phosphate
  modified_base 12: mod_base = OTHER; note = 2'-O-methylguanosine-3'-phosphate
  modified_base 13: mod_base = OTHER; note = 2'-O-methyluridine-3'-phosphate
  modified_base 14: mod_base = OTHER; note = 2'-O-methyladenosine-3'-phosphate
  modified_base 15: mod_base = OTHER; note = 2'-O-methyladenosine-3'-phosphate
  modified_base 16: mod_base = OTHER; note = 2'-O-methyladenosine-3'-phosphate
  modified_base 17: mod_base = OTHER; note = 2'-O-methylguanosine-3'-phosphate
  modified_base 18: mod_base = OTHER; note = 2'-O-methyladenosine-3'-phosphate
  modified_base 19: mod_base = OTHER; note = 2'-O-methylguanosine-3'-phosphate
  modified_base 20: mod_base = OTHER; note = 2'-O-methylguanosine-3'-phosphate
  modified_base 21: mod_base = OTHER; note = 2'-O-methyluridine-3'-phosphate ((2S,4R)-1-[29-[[2-(acetylamino)-2-deoxy-beta-D-galactopyra nosyl]oxy]-14,14-bis[[3-[[3-[[5-[[2-(acetylamino)-2-deoxy-b eta-D-galactopyranosyl]oxy]-1-oxopentyl]amino]propyl]amino] -3-oxopropoxy]methyl]-1,12,19,25-tetraoxo-16-oxa-13,20,24-t riazanonacos-1-yl]-4-hydroxy-2-pyrrolidinyl)methyl ester
aagatgattgtgtaaagaggt

SEQ ID NO: 352 - RNA, 21 nt, synthetic construct
  source 1..21: mol_type = other RNA
  modified_base 1: mod_base = OTHER; note = 2'-O-methylguanosine-3'-phosphorothioate
  modified_base 2: mod_base = OTHER; note = 2'-O-methylguanosine-3'-phosphorothioate
  modified_base 3: mod_base = OTHER; note = 2'-O-methylguanosine-3'-phosphate
  modified_base 4: mod_base = OTHER; note = 2'-O-methyluridine-3'-phosphate
  modified_base 5: mod_base = OTHER; note = 2'-O-methyladenosine-3'-phosphate
  modified_base 6: mod_base = OTHER; note = 2'-O-methylguanosine-3'-phosphate
  modified_base 7: mod_base = OTHER; note = 2'-deoxy-2'-fluoroadenosine-3'-phosphate
  modified_base 8: mod_base = OTHER; note = 2'-O-methylguanosine-3'-phosphate
  modified_base 9: mod_base = OTHER; note = 2'-deoxy-2'-fluorocytidine-3'-phosphate
  modified_base 10: mod_base = OTHER; note = 2'-deoxy-2'-fluorouridine-3'-phosphate
  modified_base 11: mod_base = OTHER; note = 2'-deoxy-2'-fluoroguanosine-3'-phosphate
  modified_base 12: mod_base = OTHER; note = 2'-O-methyluridine-3'-phosphate
  modified_base 13: mod_base = OTHER; note = 2'-O-methyladenosine-3'-phosphate
  modified_base 14: mod_base = OTHER; note = 2'-O-methyladenosine-3'-phosphate
  modified_base 15: mod_base = OTHER; note = 2'-O-methyladenosine-3'-phosphate
  modified_base 16: mod_base = OTHER; note = 2'-O-methylcytidine-3'-phosphate
  modified_base 17: mod_base = OTHER; note = 2'-O-methyladenosine-3'-phosphate
  modified_base 18: mod_base = OTHER; note = 2'-O-methyluridine-3'-phosphate
  modified_base 19: mod_base = OTHER; note = 2'-O-methylcytidine-3'-phosphate
  modified_base 20: mod_base = OTHER; note = 2'-O-methyladenosine-3'-phosphate
  modified_base 21: mod_base = OTHER; note = 2'-O-methyluridine-3'-phosphate ((2S,4R)-1-[29-[[2-(acetylamino)-2-deoxy-beta-D-galactopyra nosyl]oxy]-14,14-bis[[3-[[3-[[5-[[2-(acetylamino)-2-deoxy-b eta-D-galactopyranosyl]oxy]-1-oxopentyl]amino]propyl]amino] -3-oxopropoxy]methyl]-1,12,19,25-tetraoxo-16-oxa-13,20,24-t riazanonacos-1-yl]-4-hydroxy-2-pyrrolidinyl)methyl ester
gggtagagctgtaaacatcat

SEQ ID NO: 353 - RNA, 21 nt, synthetic construct
  source 1..21: mol_type = other RNA
  modified_base 1: mod_base = OTHER; note = 2'-O-methyladenosine-3'-phosphorothioate
  modified_base 2: mod_base = OTHER; note = 2'-O-methylcytidine-3'-phosphorothioate
  modified_base 3: mod_base = OTHER; note = 2'-O-methyladenosine-3'-phosphate
  modified_base 4: mod_base = OTHER; note = 2'-O-methyluridine-3'-phosphate
  modified_base 5: mod_base = OTHER; note = 2'-O-methylcytidine-3'-phosphate
  modified_base 6: mod_base = OTHER; note = 2'-O-methyladenosine-3'-phosphate
  modified_base 7: mod_base = OTHER; note = 2'-deoxy-2'-fluorocytidine-3'-phosphate
  modified_base 8: mod_base = OTHER; note = 2'-O-methylcytidine-3'-phosphate
  modified_base 9: mod_base = OTHER; note = 2'-deoxy-2'-fluoroadenosine-3'-phosphate
  modified_base 10: mod_base = OTHER; note = 2'-deoxy-2'-fluoroguanosine-3'-phosphate
  modified_base 11: mod_base = OTHER; note = 2'-deoxy-2'-fluorouridine-3'-phosphate
  modified_base 12: mod_base = OTHER; note = 2'-O-methylguanosine-3'-phosphate
  modified_base 13: mod_base = OTHER; note = 2'-O-methyladenosine-3'-phosphate
  modified_base 14: mod_base = OTHER; note = 2'-O-methyladenosine-3'-phosphate
  modified_base 15: mod_base = OTHER; note = 2'-O-methyladenosine-3'-phosphate
  modified_base 16: mod_base = OTHER; note = 2'-O-methyladenosine-3'-phosphate
  modified_base 17: mod_base = OTHER; note = 2'-O-methylcytidine-3'-phosphate
  modified_base 18: mod_base = OTHER; note = 2'-O-methylcytidine-3'-phosphate
  modified_base 19: mod_base = OTHER; note = 2'-O-methyluridine-3'-phosphate
  modified_base 20: mod_base = OTHER; note = 2'-O-methylcytidine-3'-phosphate
  modified_base 21: mod_base = OTHER; note = 2'-O-methyluridine-3'-phosphate ((2S,4R)-1-[29-[[2-(acetylamino)-2-deoxy-beta-D-galactopyra nosyl]oxy]-14,14-bis[[3-[[3-[[5-[[2-(acetylamino)-2-deoxy-b eta-D-galactopyranosyl]oxy]-1-oxopentyl]amino]propyl]amino] -3-oxopropoxy]methyl]-1,12,19,25-tetraoxo-16-oxa-13,20,24-t riazanonacos-1-yl]-4-hydroxy-2-pyrrolidinyl)methyl ester
acatcaccagtgaaaacctct

SEQ ID NO: 354 - RNA, 21 nt, synthetic construct
  source 1..21: mol_type = other RNA
  modified_base 1: mod_base = OTHER; note = 2'-O-methylcytidine-3'-phosphorothioate
  modified_base 2: mod_base = OTHER; note = 2'-O-methyluridine-3'-phosphorothioate
  modified_base 3: mod_base = OTHER; note = 2'-O-methylcytidine-3'-phosphate
  modified_base 4: mod_base = OTHER; note = 2'-O-methyladenosine-3'-phosphate
  modified_base 5: mod_base = OTHER; note = 2'-O-methyluridine-3'-phosphate
  modified_base 6: mod_base = OTHER; note = 2'-O-methyladenosine-3'-phosphate
  modified_base 7: mod_base = OTHER; note = 2'-deoxy-2'-fluoroguanosine-3'-phosphate
  modified_base 8: mod_base = OTHER; note = 2'-O-methyladenosine-3'-phosphate
  modified_base 9: mod_base = OTHER; note = 2'-deoxy-2'-fluorouridine-3'-phosphate
  modified_base 10: mod_base = OTHER; note = 2'-deoxy-2'-fluoroguanosine-3'-phosphate
  modified_base 11: mod_base = OTHER; note = 2'-deoxy-2'-fluoroadenosine-3'-phosphate
  modified_base 12: mod_base = OTHER; note = 2'-O-methyluridine-3'-phosphate
  modified_base 13: mod_base = OTHER; note = 2'-O-methylguanosine-3'-phosphate
  modified_base 14: mod_base = OTHER; note = 2'-O-methyluridine-3'-phosphate
  modified_base 15: mod_base = OTHER; note = 2'-O-methyluridine-3'-phosphate
  modified_base 16: mod_base = OTHER; note = 2'-O-methylguanosine-3'-phosphate
  modified_base 17: mod_base = OTHER; note = 2'-O-methyluridine-3'-phosphate
  modified_base 18: mod_base = OTHER; note = 2'-O-methyluridine-3'-phosphate
  modified_base 19: mod_base = OTHER; note = 2'-O-methyluridine-3'-phosphate
  modified_base 20: mod_base = OTHER; note = 2'-O-methylcytidine-3'-phosphate
  modified_base 21: mod_base = OTHER; note = 2'-O-methyluridine-3'-phosphate ((2S,4R)-1-[29-[[2-(acetylamino)-2-deoxy-beta-D-galactopyra nosyl]oxy]-14,14-bis[[3-[[3-[[5-[[2-(acetylamino)-2-deoxy-b eta-D-galactopyranosyl]oxy]-1-oxopentyl]amino]propyl]amino] -3-oxopropoxy]methyl]-1,12,19,25-tetraoxo-16-oxa-13,20,24-t riazanonacos-1-yl]-4-hydroxy-2-pyrrolidinyl)methyl ester
ctcatagatgatgttgtttct

SEQ ID NO: 355 - RNA, 21 nt, synthetic construct
  source 1..21: mol_type = other RNA
  modified_base 1: mod_base = OTHER; note = 2'-O-methyluridine-3'-phosphorothioate
  modified_base 2: mod_base = OTHER; note = 2'-O-methyluridine-3'-phosphorothioate
  modified_base 3: mod_base = OTHER; note = 2'-O-methylguanosine-3'-phosphate
  modified_base 4: mod_base = OTHER; note = 2'-O-methyluridine-3'-phosphate
  modified_base 5: mod_base = OTHER; note = 2'-O-methyluridine-3'-phosphate
  modified_base 6: mod_base = OTHER; note = 2'-O-methyluridine-3'-phosphate
  modified_base 7: mod_base = OTHER; note = 2'-deoxy-2'-fluorocytidine-3'-phosphate
  modified_base 8: mod_base = OTHER; note = 2'-O-methyladenosine-3'-phosphate
  modified_base 9: mod_base = OTHER; note = 2'-deoxy-2'-fluorocytidine-3'-phosphate
  modified_base 10: mod_base = OTHER; note = 2'-deoxy-2'-fluorouridine-3'-phosphate
  modified_base 11: mod_base = OTHER; note = 2'-deoxy-2'-fluorocytidine-3'-phosphate
  modified_base 12: mod_base = OTHER; note = 2'-O-methyladenosine-3'-phosphate
  modified_base 13: mod_base = OTHER; note = 2'-O-methyluridine-3'-phosphate
  modified_base 14: mod_base = OTHER; note = 2'-O-methyladenosine-3'-phosphate
  modified_base 15: mod_base = OTHER; note = 2'-O-methyladenosine-3'-phosphate
  modified_base 16: mod_base = OTHER; note = 2'-O-methylguanosine-3'-phosphate
  modified_base 17: mod_base = OTHER; note = 2'-O-methyladenosine-3'-phosphate
  modified_base 18: mod_base = OTHER; note = 2'-O-methylguanosine-3'-phosphate
  modified_base 19: mod_base = OTHER; note = 2'-O-methylguanosine-3'-phosphate
  modified_base 20: mod_base = OTHER; note = 2'-O-methyluridine-3'-phosphate
  modified_base 21: mod_base = OTHER; note = 2'-O-methyluridine-3'-phosphate ((2S,4R)-1-[29-[[2-(acetylamino)-2-deoxy-beta-D-galactopyra nosyl]oxy]-14,14-bis[[3-[[3-[[5-[[2-(acetylamino)-2-deoxy-b eta-D-galactopyranosyl]oxy]-1-oxopentyl]amino]propyl]amino] -3-oxopropoxy]methyl]-1,12,19,25-tetraoxo-16-oxa-13,20,24-t riazanonacos-1-yl]-4-hydroxy-2-pyrrolidinyl)methyl ester
ttgtttcactcataagaggtt

SEQ ID NO: 356 - RNA, 21 nt, synthetic construct
  source 1..21: mol_type = other RNA
  modified_base 1: mod_base = OTHER; note = 2'-O-methylguanosine-3'-phosphorothioate
  modified_base 2: mod_base = OTHER; note = 2'-O-methyladenosine-3'-phosphorothioate
  modified_base 3: mod_base = OTHER; note = 2'-O-methyladenosine-3'-phosphate
  modified_base 4: mod_base = OTHER; note = 2'-O-methylcytidine-3'-phosphate
  modified_base 5: mod_base = OTHER; note = 2'-O-methylcytidine-3'-phosphate
  modified_base 6: mod_base = OTHER; note = 2'-O-methyladenosine-3'-phosphate
  modified_base 7: mod_base = OTHER; note = 2'-deoxy-2'-fluoroguanosine-3'-phosphate
  modified_base 8: mod_base = OTHER; note = 2'-O-methyladenosine-3'-phosphate
  modified_base 9: mod_base = OTHER; note = 2'-deoxy-2'-fluoroadenosine-3'-phosphate
  modified_base 10: mod_base = OTHER; note = 2'-deoxy-2'-fluoroadenosine-3'-phosphate
  modified_base 11: mod_base = OTHER; note = 2'-deoxy-2'-fluoroadenosine-3'-phosphate
  modified_base 12: mod_base = OTHER; note = 2'-O-methyluridine-3'-phosphate
  modified_base 13: mod_base = OTHER; note = 2'-O-methyladenosine-3'-phosphate
  modified_base 14: mod_base = OTHER; note = 2'-O-methyluridine-3'-phosphate
  modified_base 15: mod_base = OTHER; note = 2'-O-methylguanosine-3'-phosphate
  modified_base 16: mod_base = OTHER; note = 2'-O-methylcytidine-3'-phosphate
  modified_base 17: mod_base = OTHER; note = 2'-O-methyladenosine-3'-phosphate
  modified_base 18: mod_base = OTHER; note = 2'-O-methyluridine-3'-phosphate
  modified_base 19: mod_base = OTHER; note = 2'-O-methyluridine-3'-phosphate
  modified_base 20: mod_base = OTHER; note = 2'-O-methyluridine-3'-phosphate
  modified_base 21: mod_base = OTHER; note = 2'-O-methyluridine-3'-phosphate ((2S,4R)-1-[29-[[2-(acetylamino)-2-deoxy-beta-D-galactopyra nosyl]oxy]-14,14-bis[[3-[[3-[[5-[[2-(acetylamino)-2-deoxy-b eta-D-galactopyranosyl]oxy]-1-oxopentyl]amino]propyl]amino] -3-oxopropoxy]methyl]-1,12,19,25-tetraoxo-16-oxa-13,20,24-t riazanonacos-1-yl]-4-hydroxy-2-pyrrolidinyl)methyl ester
gaaccagaaaatatgcatttt

SEQ ID NO: 357 - RNA, 21 nt, synthetic construct
  source 1..21: mol_type = other RNA
  modified_base 1: mod_base = OTHER; note = 2'-O-methylguanosine-3'-phosphorothioate
  modified_base 2: mod_base = OTHER; note = 2'-O-methyladenosine-3'-phosphorothioate
  modified_base 3: mod_base = OTHER; note = 2'-O-methyladenosine-3'-phosphate
  modified_base 4: mod_base = OTHER; note = 2'-O-methylcytidine-3'-phosphate
  modified_base 5: mod_base = OTHER; note = 2'-O-methyluridine-3'-phosphate
  modified_base 6: mod_base = OTHER; note = 2'-O-methylguanosine-3'-phosphate
  modified_base 7: mod_base = OTHER; note = 2'-deoxy-2'-fluoroadenosine-3'-phosphate
  modified_base 8: mod_base = OTHER; note = 2'-O-methyladenosine-3'-phosphate
  modified_base 9: mod_base = OTHER; note = 2'-deoxy-2'-fluoroadenosine-3'-phosphate
  modified_base 10: mod_base = OTHER; note = 2'-deoxy-2'-fluoroguanosine-3'-phosphate
  modified_base 11: mod_base = OTHER; note = 2'-deoxy-2'-fluoroadenosine-3'-phosphate
  modified_base 12: mod_base = OTHER; note = 2'-O-methyladenosine-3'-phosphate
  modified_base 13: mod_base = OTHER; note = 2'-O-methyladenosine-3'-phosphate
  modified_base 14: mod_base = OTHER; note = 2'-O-methyladenosine-3'-phosphate
  modified_base 15: mod_base = OTHER; note = 2'-O-methylguanosine-3'-phosphate
  modified_base 16: mod_base = OTHER; note = 2'-O-methylcytidine-3'-phosphate
  modified_base 17: mod_base = OTHER; note = 2'-O-methyluridine-3'-phosphate
  modified_base 18: mod_base = OTHER; note = 2'-O-methyluridine-3'-phosphate
  modified_base 19: mod_base = OTHER; note = 2'-O-methylcytidine-3'-phosphate
  modified_base 20: mod_base = OTHER; note = 2'-O-methyluridine-3'-phosphate
  modified_base 21: mod_base = OTHER; note = 2'-O-methyluridine-3'-phosphate ((2S,4R)-1-[29-[[2-(acetylamino)-2-deoxy-beta-D-galactopyra nosyl]oxy]-14,14-bis[[3-[[3-[[5-[[2-(acetylamino)-2-deoxy-b eta-D-galactopyranosyl]oxy]-1-oxopentyl]amino]propyl]amino] -3-oxopropoxy]methyl]-1,12,19,25-tetraoxo-16-oxa-13,20,24-t riazanonacos-1-yl]-4-hydroxy-2-pyrrolidinyl)methyl ester
gaactgaaagaaaagcttctt

SEQ ID NO: 358 - RNA, 21 nt, synthetic construct
  source 1..21: mol_type = other RNA
  modified_base 1: mod_base = OTHER; note = 2'-O-methylcytidine-3'-phosphorothioate
  modified_base 2: mod_base = OTHER; note = 2'-O-methylguanosine-3'-phosphorothioate
  modified_base 3: mod_base = OTHER; note = 2'-O-methyladenosine-3'-phosphate
  modified_base 4: mod_base = OTHER; note = 2'-O-methylguanosine-3'-phosphate
  modified_base 5: mod_base = OTHER; note = 2'-O-methylguanosine-3'-phosphate
  modified_base 6: mod_base = OTHER; note = 2'-O-methyladenosine-3'-phosphate
  modified_base 7: mod_base = OTHER; note = 2'-deoxy-2'-fluoroadenosine-3'-phosphate
  modified_base 8: mod_base = OTHER; note = 2'-O-methylcytidine-3'-phosphate
  modified_base 9: mod_base = OTHER; note = 2'-deoxy-2'-fluorocytidine-3'-phosphate
  modified_base 10: mod_base = OTHER; note = 2'-deoxy-2'-fluoroguanosine-3'-phosphate
  modified_base 11: mod_base = OTHER; note = 2'-deoxy-2'-fluorouridine-3'-phosphate
  modified_base 12: mod_base = OTHER; note = 2'-O-methylguanosine-3'-phosphate
  modified_base 13: mod_base = OTHER; note = 2'-O-methyladenosine-3'-phosphate
  modified_base 14: mod_base = OTHER; note = 2'-O-methyluridine-3'-phosphate
  modified_base 15: mod_base = OTHER; note = 2'-O-methyluridine-3'-phosphate
  modified_base 16: mod_base = OTHER; note = 2'-O-methylguanosine-3'-phosphate
  modified_base 17: mod_base = OTHER; note = 2'-O-methyladenosine-3'-phosphate
  modified_base 18: mod_base = OTHER; note = 2'-O-methyluridine-3'-phosphate
  modified_base 19: mod_base = OTHER; note = 2'-O-methylguanosine-3'-phosphate
  modified_base 20: mod_base = OTHER; note = 2'-O-methyluridine-3'-phosphate
  modified_base 21: mod_base = OTHER; note = 2'-O-methyluridine-3'-phosphate ((2S,4R)-1-[29-[[2-(acetylamino)-2-deoxy-beta-D-galactopyra nosyl]oxy]-14,14-bis[[3-[[3-[[5-[[2-(acetylamino)-2-deoxy-b eta-D-galactopyranosyl]oxy]-1-oxopentyl]amino]propyl]amino] -3-oxopropoxy]methyl]-1,12,19,25-tetraoxo-16-oxa-13,20,24-t riazanonacos-1-yl]-4-hydroxy-2-pyrrolidinyl)methyl ester
cgaggaaccgtgattgatgtt

SEQ ID NO: 359 - RNA, 21 nt, synthetic construct
  source 1..21: mol_type = other RNA
  modified_base 1: mod_base = OTHER; note = 2'-O-methyluridine-3'-phosphorothioate
  modified_base 2: mod_base = OTHER; note = 2'-O-methylguanosine-3'-phosphorothioate
  modified_base 3: mod_base = OTHER; note = 2'-O-methyladenosine-3'-phosphate
  modified_base 4: mod_base = OTHER; note = 2'-O-methyluridine-3'-phosphate
  modified_base 5: mod_base = OTHER; note = 2'-O-methylguanosine-3'-phosphate
  modified_base 6: mod_base = OTHER; note = 2'-O-methyluridine-3'-phosphate
  modified_base 7: mod_base = OTHER; note = 2'-deoxy-2'-fluoroguanosine-3'-phosphate
  modified_base 8: mod_base = OTHER; note = 2'-O-methyladenosine-3'-phosphate
  modified_base 9: mod_base = OTHER; note = 2'-deoxy-2'-fluorocytidine-3'-phosphate
  modified_base 10: mod_base = OTHER; note = 2'-deoxy-2'-fluorouridine-3'-phosphate
  modified_base 11: mod_base = OTHER; note = 2'-deoxy-2'-fluoroguanosine-3'-phosphate
  modified_base 12: mod_base = OTHER; note = 2'-O-methyladenosine-3'-phosphate
  modified_base 13: mod_base = OTHER; note = 2'-O-methylcytidine-3'-phosphate
  modified_base 14: mod_base = OTHER; note = 2'-O-methyluridine-3'-phosphate
  modified_base 15: mod_base = OTHER; note = 2'-O-methyluridine-3'-phosphate
  modified_base 16: mod_base = OTHER; note = 2'-O-methyluridine-3'-phosphate
  modified_base 17: mod_base = OTHER; note = 2'-O-methylguanosine-3'-phosphate
  modified_base 18: mod_base = OTHER; note = 2'-O-methyluridine-3'-phosphate
  modified_base 19: mod_base = OTHER; note = 2'-O-methylcytidine-3'-phosphate
  modified_base 20: mod_base = OTHER; note = 2'-O-methyladenosine-3'-phosphate
  modified_base 21: mod_base = OTHER; note = 2'-O-methyluridine-3'-phosphate ((2S,4R)-1-[29-[[2-(acetylamino)-2-deoxy-beta-D-galactopyra nosyl]oxy]-14,14-bis[[3-[[3-[[5-[[2-(acetylamino)-2-deoxy-b eta-D-galactopyranosyl]oxy]-1-oxopentyl]amino]propyl]amino] -3-oxopropoxy]methyl]-1,12,19,25-tetraoxo-16-oxa-13,20,24-t riazanonacos-1-yl]-4-hydroxy-2-pyrrolidinyl)methyl ester
tgatgtgactgactttgtcat

SEQ ID NO: 360 - RNA, 21 nt, synthetic construct
  source 1..21: mol_type = other RNA
  modified_base 1: mod_base = OTHER; note = 2'-O-methylcytidine-3'-phosphorothioate
  modified_base 2: mod_base = OTHER; note = 2'-O-methyluridine-3'-phosphorothioate
  modified_base 3: mod_base = OTHER; note = 2'-O-methyluridine-3'-phosphate
  modified_base 4: mod_base = OTHER; note = 2'-O-methylcytidine-3'-phosphate
  modified_base 5: mod_base = OTHER; note = 2'-O-methylcytidine-3'-phosphate
  modified_base 6: mod_base = OTHER; note = 2'-O-methyladenosine-3'-phosphate
  modified_base 7: mod_base = OTHER; note = 2'-deoxy-2'-fluorouridine-3'-phosphate
  modified_base 8: mod_base = OTHER; note = 2'-O-methyladenosine-3'-phosphate
  modified_base 9: mod_base = OTHER; note = 2'-deoxy-2'-fluoroadenosine-3'-phosphate
  modified_base 10: mod_base = OTHER; note = 2'-deoxy-2'-fluoroadenosine-3'-phosphate
  modified_base 11: mod_base = OTHER; note = 2'-deoxy-2'-fluorouridine-3'-phosphate
  modified_base 12: mod_base = OTHER; note = 2'-O-methylguanosine-3'-phosphate
  modified_base 13: mod_base = OTHER; note = 2'-O-methyladenosine-3'-phosphate
  modified_base 14: mod_base = OTHER; note = 2'-O-methyluridine-3'-phosphate
  modified_base 15: mod_base = OTHER; note = 2'-O-methylguanosine-3'-phosphate
  modified_base 16: mod_base = OTHER; note = 2'-O-methylcytidine-3'-phosphate
  modified_base 17: mod_base = OTHER; note = 2'-O-methyluridine-3'-phosphate
  modified_base 18: mod_base = OTHER; note = 2'-O-methylcytidine-3'-phosphate
  modified_base 19: mod_base = OTHER; note = 2'-O-methylcytidine-3'-phosphate
  modified_base 20: mod_base = OTHER; note = 2'-O-methyluridine-3'-phosphate
  modified_base 21: mod_base = OTHER; note = 2'-O-methyluridine-3'-phosphate ((2S,4R)-1-[29-[[2-(acetylamino)-2-deoxy-beta-D-galactopyra nosyl]oxy]-14,14-bis[[3-[[3-[[5-[[2-(acetylamino)-2-deoxy-b eta-D-galactopyranosyl]oxy]-1-oxopentyl]amino]propyl]amino] -3-oxopropoxy]methyl]-1,12,19,25-tetraoxo-16-oxa-13,20,24-t riazanonacos-1-yl]-4-hydroxy-2-pyrrolidinyl)methyl ester
cttccataaatgatgctcctt

SEQ ID NO: 361 - RNA, 21 nt, synthetic construct
  source 1..21: mol_type = other RNA
  modified_base 1: mod_base = OTHER; note = 2'-O-methylcytidine-3'-phosphorothioate
  modified_base 2: mod_base = OTHER; note = 2'-O-methyluridine-3'-phosphorothioate
  modified_base 3: mod_base = OTHER; note = 2'-O-methylcytidine-3'-phosphate
  modified_base 4: mod_base = OTHER; note = 2'-O-methylcytidine-3'-phosphate
  modified_base 5: mod_base = OTHER; note = 2'-O-methyluridine-3'-phosphate
  modified_base 6: mod_base = OTHER; note = 2'-O-methylguanosine-3'-phosphate
  modified_base 7: mod_base = OTHER; note = 2'-deoxy-2'-fluorouridine-3'-phosphate
  modified_base 8: mod_base = OTHER; note = 2'-O-methyluridine-3'-phosphate
  modified_base 9: mod_base = OTHER; note = 2'-deoxy-2'-fluorocytidine-3'-phosphate
  modified_base 10: mod_base = OTHER; note = 2'-deoxy-2'-fluorouridine-3'-phosphate
  modified_base 11: mod_base = OTHER; note = 2'-deoxy-2'-fluorocytidine-3'-phosphate
  modified_base 12: mod_base = OTHER; note = 2'-O-methyladenosine-3'-phosphate
  modified_base 13: mod_base = OTHER; note = 2'-O-methyluridine-3'-phosphate
  modified_base 14: mod_base = OTHER; note = 2'-O-methyluridine-3'-phosphate
  modified_base 15: mod_base = OTHER; note = 2'-O-methyladenosine-3'-phosphate
  modified_base 16: mod_base = OTHER; note = 2'-O-methylguanosine-3'-phosphate
  modified_base 17: mod_base = OTHER; note = 2'-O-methyluridine-3'-phosphate
  modified_base 18: mod_base = OTHER; note = 2'-O-methylcytidine-3'-phosphate
  modified_base 19: mod_base = OTHER; note = 2'-O-methyladenosine-3'-phosphate
  modified_base 20: mod_base = OTHER; note = 2'-O-methyladenosine-3'-phosphate
  modified_base 21: mod_base = OTHER; note = 2'-O-methyluridine-3'-phosphate ((2S,4R)-1-[29-[[2-(acetylamino)-2-deoxy-beta-D-galactopyra nosyl]oxy]-14,14-bis[[3-[[3-[[5-[[2-(acetylamino)-2-deoxy-b eta-D-galactopyranosyl]oxy]-1-oxopentyl]amino]propyl]amino] -3-oxopropoxy]methyl]-1,12,19,25-tetraoxo-16-oxa-13,20,24-t riazanonacos-1-yl]-4-hydroxy-2-pyrrolidinyl)methyl ester
ctcctgttctcattagtcaat

SEQ ID NO: 362 - RNA, 21 nt, synthetic construct
  source 1..21: mol_type = other RNA
  modified_base 1: mod_base = OTHER; note = 2'-O-methylcytidine-3'-phosphorothioate
  modified_base 2: mod_base = OTHER; note = 2'-O-methyluridine-3'-phosphorothioate
  modified_base 3: mod_base = OTHER; note = 2'-O-methyladenosine-3'-phosphate
  modified_base 4: mod_base = OTHER; note = 2'-O-methyluridine-3'-phosphate
  modified_base 5: mod_base = OTHER; note = 2'-O-methyladenosine-3'-phosphate
  modified_base 6: mod_base = OTHER; note = 2'-O-methyluridine-3'-phosphate
  modified_base 7: mod_base = OTHER; note = 2'-deoxy-2'-fluoroadenosine-3'-phosphate
  modified_base 8: mod_base = OTHER; note = 2'-O-methyluridine-3'-phosphate
  modified_base 9: mod_base = OTHER; note = 2'-deoxy-2'-fluoroadenosine-3'-phosphate
  modified_base 10: mod_base = OTHER; note = 2'-deoxy-2'-fluoroadenosine-3'-phosphate
  modified_base 11: mod_base = OTHER; note = 2'-deoxy-2'-fluorouridine-3'-phosphate
  modified_base 12: mod_base = OTHER; note = 2'-O-methylcytidine-3'-phosphate
  modified_base 13: mod_base = OTHER; note = 2'-O-methyluridine-3'-phosphate
  modified_base 14: mod_base = OTHER; note = 2'-O-methylguanosine-3'-phosphate
  modified_base 15: mod_base = OTHER; note = 2'-O-methylguanosine-3'-phosphate
  modified_base 16: mod_base = OTHER; note = 2'-O-methyluridine-3'-phosphate
  modified_base 17: mod_base = OTHER; note = 2'-O-methyluridine-3'-phosphate
  modified_base 18: mod_base = OTHER; note = 2'-O-methylcytidine-3'-phosphate
  modified_base 19: mod_base = OTHER; note = 2'-O-methylcytidine-3'-phosphate
  modified_base 20: mod_base = OTHER; note = 2'-O-methyladenosine-3'-phosphate
  modified_base 21: mod_base = OTHER; note = 2'-O-methyluridine-3'-phosphate ((2S,4R)-1-[29-[[2-(acetylamino)-2-deoxy-beta-D-galactopyra nosyl]oxy]-14,14-bis[[3-[[3-[[5-[[2-(acetylamino)-2-deoxy-b eta-D-galactopyranosyl]oxy]-1-oxopentyl]amino]propyl]amino] -3-oxopropoxy]methyl]-1,12,19,25-tetraoxo-16-oxa-13,20,24-t riazanonacos-1-yl]-4-hydroxy-2-pyrrolidinyl)methyl ester
ctatatataatctggttccat

SEQ ID NO: 363 - RNA, 21 nt, synthetic construct
  source 1..21: mol_type = other RNA
  modified_base 1: mod_base = OTHER; note = 2'-O-methyluridine-3'-phosphorothioate
  modified_base 2: mod_base = OTHER; note = 2'-O-methylguanosine-3'-phosphorothioate
  modified_base 3: mod_base = OTHER; note = 2'-O-methylguanosine-3'-phosphate
  modified_base 4: mod_base = OTHER; note = 2'-O-methyluridine-3'-phosphate
  modified_base 5: mod_base = OTHER; note = 2'-O-methyluridine-3'-phosphate
  modified_base 6: mod_base = OTHER; note = 2'-O-methylcytidine-3'-phosphate
  modified_base 7: mod_base = OTHER; note = 2'-deoxy-2'-fluorocytidine-3'-phosphate
  modified_base 8: mod_base = OTHER; note = 2'-O-methyladenosine-3'-phosphate
  modified_base 9: mod_base = OTHER; note = 2'-deoxy-2'-fluoroguanosine-3'-phosphate
  modified_base 10: mod_base = OTHER; note = 2'-deoxy-2'-fluorouridine-3'-phosphate
  modified_base 11: mod_base = OTHER; note = 2'-deoxy-2'-fluoroguanosine-3'-phosphate
  modified_base 12: mod_base = OTHER; note = 2'-O-methyladenosine-3'-phosphate
  modified_base 13: mod_base = OTHER; note = 2'-O-methyladenosine-3'-phosphate
  modified_base 14: mod_base = OTHER; note = 2'-O-methyladenosine-3'-phosphate
  modified_base 15: mod_base = OTHER; note = 2'-O-methyladenosine-3'-phosphate
  modified_base 16: mod_base = OTHER; note = 2'-O-methyluridine-3'-phosphate
  modified_base 17: mod_base = OTHER; note = 2'-O-methylguanosine-3'-phosphate
  modified_base 18: mod_base = OTHER; note = 2'-O-methyladenosine-3'-phosphate
  modified_base 19: mod_base = OTHER; note = 2'-O-methyladenosine-3'-phosphate
  modified_base 20: mod_base = OTHER; note = 2'-O-methyladenosine-3'-phosphate
  modified_base 21: mod_base = OTHER; note = 2'-O-methyluridine-3'-phosphate ((2S,4R)-1-[29-[[2-(acetylamino)-2-deoxy-beta-D-galactopyra nosyl]oxy]-14,14-bis[[3-[[3-[[5-[[2-(acetylamino)-2-deoxy-b eta-D-galactopyranosyl]oxy]-1-oxopentyl]amino]propyl]amino] -3-oxopropoxy]methyl]-1,12,19,25-tetraoxo-16-oxa-13,20,24-t riazanonacos-1-yl]-4-hydroxy-2-pyrrolidinyl)methyl ester
tggttccagtgaaaatgaaat

SEQ ID NO: 364 - RNA, 21 nt, synthetic construct
  source 1..21: mol_type = other RNA
  modified_base 1: mod_base = OTHER; note = 2'-O-methyladenosine-3'-phosphorothioate
  modified_base 2: mod_base = OTHER; note = 2'-O-methylcytidine-3'-phosphorothioate
  modified_base 3: mod_base = OTHER; note = 2'-O-methyladenosine-3'-phosphate
  modified_base 4: mod_base = OTHER; note = 2'-O-methylcytidine-3'-phosphate
  modified_base 5: mod_base = OTHER; note = 2'-O-methylcytidine-3'-phosphate
  modified_base 6: mod_base = OTHER; note = 2'-O-methyluridine-3'-phosphate
  modified_base 7: mod_base = OTHER; note = 2'-deoxy-2'-fluoroadenosine-3'-phosphate
  modified_base 8: mod_base = OTHER; note = 2'-O-methyladenosine-3'-phosphate
  modified_base 9: mod_base = OTHER; note = 2'-deoxy-2'-fluoroadenosine-3'-phosphate
  modified_base 10: mod_base = OTHER; note = 2'-deoxy-2'-fluoroguanosine-3'-phosphate
  modified_base 11: mod_base = OTHER; note = 2'-deoxy-2'-fluoroadenosine-3'-phosphate
  modified_base 12: mod_base = OTHER; note = 2'-O-methyladenosine-3'-phosphate
  modified_base 13: mod_base = OTHER; note = 2'-O-methyladenosine-3'-phosphate
  modified_base 14: mod_base = OTHER; note = 2'-O-methylcytidine-3'-phosphate
  modified_base 15: mod_base = OTHER; note = 2'-O-methyladenosine-3'-phosphate
  modified_base 16: mod_base = OTHER; note = 2'-O-methyladenosine-3'-phosphate
  modified_base 17: mod_base = OTHER; note = 2'-O-methyladenosine-3'-phosphate
  modified_base 18: mod_base = OTHER; note = 2'-O-methyladenosine-3'-phosphate
  modified_base 19: mod_base = OTHER; note = 2'-O-methylcytidine-3'-phosphate
  modified_base 20: mod_base = OTHER; note = 2'-O-methyluridine-3'-phosphate
  modified_base 21: mod_base = OTHER; note = 2'-O-methyluridine-3'-phosphate ((2S,4R)-1-[29-[[2-(acetylamino)-2-deoxy-beta-D-galactopyra nosyl]oxy]-14,14-bis[[3-[[3-[[5-[[2-(acetylamino)-2-deoxy-b eta-D-galactopyranosyl]oxy]-1-oxopentyl]amino]propyl]amino] -3-oxopropoxy]methyl]-1,12,19,25-tetraoxo-16-oxa-13,20,24-t riazanonacos-1-yl]-4-hydroxy-2-pyrrolidinyl)methyl ester
acacctaaagaaacaaaactt

SEQ ID NO: 365 - RNA, 21 nt, synthetic construct
  source 1..21: mol_type = other RNA
  modified_base 1: mod_base = OTHER; note = 2'-O-methyladenosine-3'-phosphorothioate
  modified_base 2: mod_base = OTHER; note = 2'-O-methyladenosine-3'-phosphorothioate
  modified_base 3: mod_base = OTHER; note = 2'-O-methyladenosine-3'-phosphate
  modified_base 4: mod_base = OTHER; note = 2'-O-methyladenosine-3'-phosphate
  modified_base 5: mod_base = OTHER; note = 2'-O-methylcytidine-3'-phosphate
  modified_base 6: mod_base = OTHER; note = 2'-O-methyluridine-3'-phosphate
  modified_base 7: mod_base = OTHER; note = 2'-deoxy-2'-fluorouridine-3'-phosphate
  modified_base 8: mod_base = OTHER; note = 2'-O-methylguanosine-3'-phosphate
  modified_base 9: mod_base = OTHER; note = 2'-deoxy-2'-fluoroguanosine-3'-phosphate
  modified_base 10: mod_base = OTHER; note = 2'-deoxy-2'-fluoroadenosine-3'-phosphate
  modified_base 11: mod_base = OTHER; note = 2'-deoxy-2'-fluoroadenosine-3'-phosphate
  modified_base 12: mod_base = OTHER; note = 2'-O-methyladenosine-3'-phosphate
  modified_base 13: mod_base = OTHER; note = 2'-O-methylguanosine-3'-phosphate
  modified_base 14: mod_base = OTHER; note = 2'-O-methyladenosine-3'-phosphate
  modified_base 15: mod_base = OTHER; note = 2'-O-methylguanosine-3'-phosphate
  modified_base 16: mod_base = OTHER; note = 2'-O-methylcytidine-3'-phosphate
  modified_base 17: mod_base = OTHER; note = 2'-O-methylcytidine-3'-phosphate
  modified_base 18: mod_base = OTHER; note = 2'-O-methyladenosine-3'-phosphate
  modified_base 19: mod_base = OTHER; note = 2'-O-methyluridine-3'-phosphate
  modified_base 20: mod_base = OTHER; note = 2'-O-methyluridine-3'-phosphate
  modified_base 21: mod_base = OTHER; note = 2'-O-methyluridine-3'-phosphate ((2S,4R)-1-[29-[[2-(acetylamino)-2-deoxy-beta-D-galactopyra nosyl]oxy]-14,14-bis[[3-[[3-[[5-[[2-(acetylamino)-2-deoxy-b eta-D-galactopyranosyl]oxy]-1-oxopentyl]amino]propyl]amino] -3-oxopropoxy]methyl]-1,12,19,25-tetraoxo-16-oxa-13,20,24-t riazanonacos-1-yl]-4-hydroxy-2-pyrrolidinyl)methyl ester
aaaacttggaaagagccattt

SEQ ID NO: 366 - RNA, 21 nt, synthetic construct
  source 1..21: mol_type = other RNA
  modified_base 1: mod_base = OTHER; note = 2'-O-methylguanosine-3'-phosphorothioate
  modified_base 2: mod_base = OTHER; note = 2'-O-methylcytidine-3'-phosphorothioate
  modified_base 3: mod_base = OTHER; note = 2'-O-methylcytidine-3'-phosphate
  modified_base 4: mod_base = OTHER; note = 2'-O-methyladenosine-3'-phosphate
  modified_base 5: mod_base = OTHER; note = 2'-O-methyluridine-3'-phosphate
  modified_base 6: mod_base = OTHER; note = 2'-O-methyluridine-3'-phosphate
  modified_base 7: mod_base = OTHER; note = 2'-deoxy-2'-fluoroguanosine-3'-phosphate
  modified_base 8: mod_base = OTHER; note = 2'-O-methyladenosine-3'-phosphate
  modified_base 9: mod_base = OTHER; note = 2'-deoxy-2'-fluoroadenosine-3'-phosphate
  modified_base 10: mod_base = OTHER; note = 2'-deoxy-2'-fluoroguanosine-3'-phosphate
  modified_base 11: mod_base = OTHER; note = 2'-deoxy-2'-fluoroadenosine-3'-phosphate
  modified_base 12: mod_base = OTHER; note = 2'-O-methylcytidine-3'-phosphate
  modified_base 13: mod_base = OTHER; note = 2'-O-methyluridine-3'-phosphate
  modified_base 14: mod_base = OTHER; note = 2'-O-methyladenosine-3'-phosphate
  modified_base 15: mod_base = OTHER; note = 2'-O-methyluridine-3'-phosphate
  modified_base 16: mod_base = OTHER; note = 2'-O-methyladenosine-3'-phosphate
  modified_base 17: mod_base = OTHER; note = 2'-O-methyluridine-3'-phosphate
  modified_base 18: mod_base = OTHER; note = 2'-O-methylcytidine-3'-phosphate
  modified_base 19: mod_base = OTHER; note = 2'-O-methyladenosine-3'-phosphate
  modified_base 20: mod_base = OTHER; note = 2'-O-methyladenosine-3'-phosphate
  modified_base 21: mod_base = OTHER; note = 2'-O-methyluridine-3'-phosphate ((2S,4R)-1-[29-[[2-(acetylamino)-2-deoxy-beta-D-galactopyra nosyl]oxy]-14,14-bis[[3-[[3-[[5-[[2-(acetylamino)-2-deoxy-b eta-D-galactopyranosyl]oxy]-1-oxopentyl]amino]propyl]amino] -3-oxopropoxy]methyl]-1,12,19,25-tetraoxo-16-oxa-13,20,24-t riazanonacos-1-yl]-4-hydroxy-2-pyrrolidinyl)methyl ester
gccattgaagactatatcaat

SEQ ID NO: 367 - RNA, 21 nt, synthetic construct
  source 1..21: mol_type = other RNA
  modified_base 1: mod_base = OTHER; note = 2'-O-methyluridine-3'-phosphorothioate
  modified_base 2: mod_base = OTHER; note = 2'-O-methylguanosine-3'-phosphorothioate
  modified_base 3: mod_base = OTHER; note = 2'-O-methyluridine-3'-phosphate
  modified_base 4: mod_base = OTHER; note = 2'-O-methyladenosine-3'-phosphate
  modified_base 5: mod_base = OTHER; note = 2'-O-methyladenosine-3'-phosphate
  modified_base 6: mod_base = OTHER; note = 2'-O-methylguanosine-3'-phosphate
  modified_base 7: mod_base = OTHER; note = 2'-deoxy-2'-fluoroadenosine-3'-phosphate
  modified_base 8: mod_base = OTHER; note = 2'-O-methyladenosine-3'-phosphate
  modified_base 9: mod_base = OTHER; note = 2'-deoxy-2'-fluoroadenosine-3'-phosphate
  modified_base 10: mod_base = OTHER; note = 2'-deoxy-2'-fluoroadenosine-3'-phosphate
  modified_base 11: mod_base = OTHER; note = 2'-deoxy-2'-fluorouridine-3'-phosphate
  modified_base 12: mod_base = OTHER; note = 2'-O-methylguanosine-3'-phosphate
  modified_base 13: mod_base = OTHER; note = 2'-O-methylcytidine-3'-phosphate
  modified_base 14: mod_base = OTHER; note = 2'-O-methylcytidine-3'-phosphate
  modified_base 15: mod_base = OTHER; note = 2'-O-methyladenosine-3'-phosphate
  modified_base 16: mod_base = OTHER; note = 2'-O-methylcytidine-3'-phosphate
  modified_base 17: mod_base = OTHER; note = 2'-O-methyladenosine-3'-phosphate
  modified_base 18: mod_base = OTHER; note = 2'-O-methylcytidine-3'-phosphate
  modified_base 19: mod_base = OTHER; note = 2'-O-methyladenosine-3'-phosphate
  modified_base 20: mod_base = OTHER; note = 2'-O-methyluridine-3'-phosphate
  modified_base 21: mod_base = OTHER; note = 2'-O-methyluridine-3'-phosphate ((2S,4R)-1-[29-[[2-(acetylamino)-2-deoxy-beta-D-galactopyra nosyl]oxy]-14,14-bis[[3-[[3-[[5-[[2-(acetylamino)-2-deoxy-b eta-D-galactopyranosyl]oxy]-1-oxopentyl]amino]propyl]amino] -3-oxopropoxy]methyl]-1,12,19,25-tetraoxo-16-oxa-13,20,24-t riazanonacos-1-yl]-4-hydroxy-2-pyrrolidinyl)methyl ester
tgtaagaaaatgccacacatt

SEQ ID NO: 368 - RNA, 21 nt, synthetic construct
  source 1..21: mol_type = other RNA
  modified_base 1: mod_base = OTHER; note = 2'-O-methylcytidine-3'-phosphorothioate
  modified_base 2: mod_base = OTHER; note = 2'-O-methyladenosine-3'-phosphorothioate
  modified_base 3: mod_base = OTHER; note = 2'-O-methyluridine-3'-phosphate
  modified_base 4: mod_base = OTHER; note = 2'-O-methylguanosine-3'-phosphate
  modified_base 5: mod_base = OTHER; note = 2'-O-methylcytidine-3'-phosphate
  modified_base 6: mod_base = OTHER; note = 2'-O-methylcytidine-3'-phosphate
  modified_base 7: mod_base = OTHER; note = 2'-deoxy-2'-fluoroadenosine-3'-phosphate
  modified_base 8: mod_base = OTHER; note = 2'-O-methyladenosine-3'-phosphate
  modified_base 9: mod_base = OTHER; note = 2'-deoxy-2'-fluoroadenosine-3'-phosphate
  modified_base 10: mod_base = OTHER; note = 2'-deoxy-2'-fluoroadenosine-3'-phosphate
  modified_base 11: mod_base = OTHER; note = 2'-deoxy-2'-fluorouridine-3'-phosphate
  modified_base 12: mod_base = OTHER; note = 2'-O-methylguanosine-3'-phosphate
  modified_base 13: mod_base = OTHER; note = 2'-O-methylguanosine-3'-phosphate
  modified_base 14: mod_base = OTHER; note = 2'-O-methyladenosine-3'-phosphate
  modified_base 15: mod_base = OTHER; note = 2'-O-methylguanosine-3'-phosphate
  modified_base 16: mod_base = OTHER; note = 2'-O-methylguanosine-3'-phosphate
  modified_base 17: mod_base = OTHER; note = 2'-O-methyluridine-3'-phosphate
  modified_base 18: mod_base = OTHER; note = 2'-O-methyladenosine-3'-phosphate
  modified_base 19: mod_base = OTHER; note = 2'-O-methylcytidine-3'-phosphate
  modified_base 20: mod_base = OTHER; note = 2'-O-methyladenosine-3'-phosphate
  modified_base 21: mod_base = OTHER; note = 2'-O-methyluridine-3'-phosphate ((2S,4R)-1-[29-[[2-(acetylamino)-2-deoxy-beta-D-galactopyra nosyl]oxy]-14,14-bis[[3-[[3-[[5-[[2-(acetylamino)-2-deoxy-b eta-D-galactopyranosyl]oxy]-1-oxopentyl]amino]propyl]amino] -3-oxopropoxy]methyl]-1,12,19,25-tetraoxo-16-oxa-13,20,24-t riazanonacos-1-yl]-4-hydroxy-2-pyrrolidinyl)methyl ester
catgccaaaatggaggtacat

SEQ ID NO: 369 - RNA, 21 nt, synthetic construct
  source 1..21: mol_type = other RNA
  modified_base 1: mod_base = OTHER; note = 2'-O-methylguanosine-3'-phosphorothioate
  modified_base 2: mod_base = OTHER; note = 2'-O-methyluridine-3'-phosphorothioate
  modified_base 3: mod_base = OTHER; note = 2'-O-methylguanosine-3'-phosphate
  modified_base 4: mod_base = OTHER; note = 2'-O-methyladenosine-3'-phosphate
  modified_base 5: mod_base = OTHER; note = 2'-O-methyluridine-3'-phosphate
  modified_base 6: mod_base = OTHER; note = 2'-O-methyluridine-3'-phosphate
  modified_base 7: mod_base = OTHER; note = 2'-deoxy-2'-fluorocytidine-3'-phosphate
  modified_base 8: mod_base = OTHER; note = 2'-O-methyluridine-3'-phosphate
  modified_base 9: mod_base = OTHER; note = 2'-deoxy-2'-fluoroadenosine-3'-phosphate
  modified_base 10: mod_base = OTHER; note = 2'-deoxy-2'-fluoroadenosine-3'-phosphate
  modified_base 11: mod_base = OTHER; note = 2'-deoxy-2'-fluorouridine-3'-phosphate
  modified_base 12: mod_base = OTHER; note = 2'-O-methylguanosine-3'-phosphate
  modified_base 13: mod_base = OTHER; note = 2'-O-methylguanosine-3'-phosphate
  modified_base 14: mod_base = OTHER; note = 2'-O-methyladenosine-3'-phosphate
  modified_base 15: mod_base = OTHER; note = 2'-O-methyluridine-3'-phosphate
  modified_base 16: mod_base = OTHER; note = 2'-O-methylguanosine-3'-phosphate
  modified_base 17: mod_base = OTHER; note = 2'-O-methylguanosine-3'-phosphate
  modified_base 18: mod_base = OTHER; note = 2'-O-methyladenosine-3'-phosphate
  modified_base 19: mod_base = OTHER; note = 2'-O-methyladenosine-3'-phosphate
  modified_base 20: mod_base = OTHER; note = 2'-O-methyladenosine-3'-phosphate
  modified_base 21: mod_base = OTHER; note = 2'-O-methyluridine-3'-phosphate ((2S,4R)-1-[29-[[2-(acetylamino)-2-deoxy-beta-D-galactopyra nosyl]oxy]-14,14-bis[[3-[[3-[[5-[[2-(acetylamino)-2-deoxy-b eta-D-galactopyranosyl]oxy]-1-oxopentyl]amino]propyl]amino] -3-oxopropoxy]methyl]-1,12,19,25-tetraoxo-16-oxa-13,20,24-t riazanonacos-1-yl]-4-hydroxy-2-pyrrolidinyl)methyl ester
gtgattctaatggatggaaat

SEQ ID NO: 370 - RNA, 21 nt, synthetic construct
  source 1..21: mol_type = other RNA
  modified_base 1: mod_base = OTHER; note = 2'-O-methylguanosine-3'-phosphorothioate
  modified_base 2: mod_base = OTHER; note = 2'-O-methyladenosine-3'-phosphorothioate
  modified_base 3: mod_base = OTHER; note = 2'-O-methyluridine-3'-phosphate
  modified_base 4: mod_base = OTHER; note = 2'-O-methylguanosine-3'-phosphate
  modified_base 5: mod_base = OTHER; note = 2'-O-methylguanosine-3'-phosphate
  modified_base 6: mod_base = OTHER; note = 2'-O-methyladenosine-3'-phosphate
  modified_base 7: mod_base = OTHER; note = 2'-deoxy-2'-fluoroadenosine-3'-phosphate
  modified_base 8: mod_base = OTHER; note = 2'-O-methyladenosine-3'-phosphate
  modified_base 9: mod_base = OTHER; note = 2'-deoxy-2'-fluoroguanosine-3'-phosphate
  modified_base 10: mod_base = OTHER; note = 2'-deoxy-2'-fluorouridine-3'-phosphate
  modified_base 11: mod_base = OTHER; note = 2'-deoxy-2'-fluoroguanosine-3'-phosphate
  modified_base 12: mod_base = OTHER; note = 2'-O-methyluridine-3'-phosphate
  modified_base 13: mod_base = OTHER; note = 2'-O-methyluridine-3'-phosphate
  modified_base 14: mod_base = OTHER; note = 2'-O-methyluridine-3'-phosphate
  modified_base 15: mod_base = OTHER; note = 2'-O-methylguanosine-3'-phosphate
  modified_base 16: mod_base = OTHER; note = 2'-O-methyluridine-3'-phosphate
  modified_base 17: mod_base = OTHER; note = 2'-O-methylguanosine-3'-phosphate
  modified_base 18: mod_base = OTHER; note = 2'-O-methyluridine-3'-phosphate
  modified_base 19: mod_base = OTHER; note = 2'-O-methylguanosine-3'-phosphate
  modified_base 20: mod_base = OTHER; note = 2'-O-methylcytidine-3'-phosphate
  modified_base 21: mod_base = OTHER; note = 2'-O-methyluridine-3'-phosphate ((2S,4R)-1-[29-[[2-(acetylamino)-2-deoxy-beta-D-galactopyra nosyl]oxy]-14,14-bis[[3-[[3-[[5-[[2-(acetylamino)-2-deoxy-b eta-D-galactopyranosyl]oxy]-1-oxopentyl]amino]propyl]amino] -3-oxopropoxy]methyl]-1,12,19,25-tetraoxo-16-oxa-13,20,24-t riazanonacos-1-yl]-4-hydroxy-2-pyrrolidinyl)methyl ester
gatggaaagtgtttgtgtgct

SEQ ID NO: 371 - RNA, 21 nt, synthetic construct
  source 1..21: mol_type = other RNA
  modified_base 1: mod_base = OTHER; note = 2'-O-methyluridine-3'-phosphorothioate
  modified_base 2: mod_base = OTHER; note = 2'-O-methylguanosine-3'-phosphorothioate
  modified_base 3: mod_base = OTHER; note = 2'-O-methyluridine-3'-phosphate
  modified_base 4: mod_base = OTHER; note = 2'-O-methylguanosine-3'-phosphate
  modified_base 5: mod_base = OTHER; note = 2'-O-methyluridine-3'-phosphate
  modified_base 6: mod_base = OTHER; note = 2'-O-methylguanosine-3'-phosphate
  modified_base 7: mod_base = OTHER; note = 2'-deoxy-2'-fluorocytidine-3'-phosphate
  modified_base 8: mod_base = OTHER; note = 2'-O-methylcytidine-3'-phosphate
  modified_base 9: mod_base = OTHER; note = 2'-deoxy-2'-fluorouridine-3'-phosphate
  modified_base 10: mod_base = OTHER; note = 2'-deoxy-2'-fluoroguanosine-3'-phosphate
  modified_base 11: mod_base = OTHER; note = 2'-deoxy-2'-fluorocytidine-3'-phosphate
  modified_base 12: mod_base = OTHER; note = 2'-O-methylcytidine-3'-phosphate
  modified_base 13: mod_base = OTHER; note = 2'-O-methylcytidine-3'-phosphate
  modified_base 14: mod_base = OTHER; note = 2'-O-methyladenosine-3'-phosphate
  modified_base 15: mod_base = OTHER; note = 2'-O-methyluridine-3'-phosphate
  modified_base 16: mod_base = OTHER; note = 2'-O-methyluridine-3'-phosphate
  modified_base 17: mod_base = OTHER; note = 2'-O-methylcytidine-3'-phosphate
  modified_base 18: mod_base = OTHER; note = 2'-O-methyladenosine-3'-phosphate
  modified_base 19: mod_base = OTHER; note = 2'-O-methyladenosine-3'-phosphate
  modified_base 20: mod_base = OTHER; note = 2'-O-methyladenosine-3'-phosphate
  modified_base 21: mod_base = OTHER; note = 2'-O-methyluridine-3'-phosphate ((2S,4R)-1-[29-[[2-(acetylamino)-2-deoxy-beta-D-galactopyra nosyl]oxy]-14,14-bis[[3-[[3-[[5-[[2-(acetylamino)-2-deoxy-b eta-D-galactopyranosyl]oxy]-1-oxopentyl]amino]propyl]amino] -3-oxopropoxy]methyl]-1,12,19,25-tetraoxo-16-oxa-13,20,24-t riazanonacos-1-yl]-4-hydroxy-2-pyrrolidinyl)methyl ester
tgtgtgcctgcccattcaaat

SEQ ID NO: 372 - RNA, 21 nt, synthetic construct
  source 1..21: mol_type = other RNA
  modified_base 1: mod_base = OTHER; note = 2'-O-methylcytidine-3'-phosphorothioate
  modified_base 2: mod_base = OTHER; note = 2'-O-methyladenosine-3'-phosphorothioate
  modified_base 3: mod_base = OTHER; note = 2'-O-methyluridine-3'-phosphate
  modified_base 4: mod_base = OTHER; note = 2'-O-methyluridine-3'-phosphate
  modified_base 5: mod_base = OTHER; note = 2'-O-methylcytidine-3'-phosphate
  modified_base 6: mod_base = OTHER; note = 2'-O-methyladenosine-3'-phosphate
  modified_base 7: mod_base = OTHER; note = 2'-deoxy-2'-fluoroadenosine-3'-phosphate
  modified_base 8: mod_base = OTHER; note = 2'-O-methyladenosine-3'-phosphate
  modified_base 9: mod_base = OTHER; note = 2'-deoxy-2'-fluorouridine-3'-phosphate
  modified_base 10: mod_base = OTHER; note = 2'-deoxy-2'-fluorouridine-3'-phosphate
  modified_base 11: mod_base = OTHER; note = 2'-deoxy-2'-fluorouridine-3'-phosphate
  modified_base 12: mod_base = OTHER; note = 2'-O-methylguanosine-3'-phosphate
  modified_base 13: mod_base = OTHER; note = 2'-O-methyladenosine-3'-phosphate
  modified_base 14: mod_base = OTHER; note = 2'-O-methylguanosine-3'-phosphate
  modified_base 15: mod_base = OTHER; note = 2'-O-methylguanosine-3'-phosphate
  modified_base 16: mod_base = OTHER; note = 2'-O-methylguanosine-3'-phosphate
  modified_base 17: mod_base = OTHER; note = 2'-O-methyladenosine-3'-phosphate
  modified_base 18: mod_base = OTHER; note = 2'-O-methyladenosine-3'-phosphate
  modified_base 19: mod_base = OTHER; note = 2'-O-methyluridine-3'-phosphate
  modified_base 20: mod_base = OTHER; note = 2'-O-methyluridine-3'-phosphate
  modified_base 21: mod_base = OTHER; note = 2'-O-methyluridine-3'-phosphate ((2S,4R)-1-[29-[[2-(acetylamino)-2-deoxy-beta-D-galactopyra nosyl]oxy]-14,14-bis[[3-[[3-[[5-[[2-(acetylamino)-2-deoxy-b eta-D-galactopyranosyl]oxy]-1-oxopentyl]amino]propyl]amino] -3-oxopropoxy]methyl]-1,12,19,25-tetraoxo-16-oxa-13,20,24-t riazanonacos-1-yl]-4-hydroxy-2-pyrrolidinyl)methyl ester
cattcaaatttgagggaattt

SEQ ID NO: 373 - RNA, 21 nt, synthetic construct
  source 1..21: mol_type = other RNA
  modified_base 1: mod_base = OTHER; note = 2'-O-methylcytidine-3'-phosphorothioate
  modified_base 2: mod_base = OTHER; note = 2'-O-methylcytidine-3'-phosphorothioate
  modified_base 3: mod_base = OTHER; note = 2'-O-methyluridine-3'-phosphate
  modified_base 4: mod_base = OTHER; note = 2'-O-methylguanosine-3'-phosphate
  modified_base 5: mod_base = OTHER; note = 2'-O-methyluridine-3'-phosphate
  modified_base 6: mod_base = OTHER; note = 2'-O-methylguanosine-3'-phosphate
  modified_base 7: mod_base = OTHER; note = 2'-deoxy-2'-fluoroadenosine-3'-phosphate
  modified_base 8: mod_base = OTHER; note = 2'-O-methyladenosine-3'-phosphate
  modified_base 9: mod_base = OTHER; note = 2'-deoxy-2'-fluoroadenosine-3'-phosphate
  modified_base 10: mod_base = OTHER; note = 2'-deoxy-2'-fluorouridine-3'-phosphate
  modified_base 11: mod_base = OTHER; note = 2'-deoxy-2'-fluorocytidine-3'-phosphate
  modified_base 12: mod_base = OTHER; note = 2'-O-methyladenosine-3'-phosphate
  modified_base 13: mod_base = OTHER; note = 2'-O-methylguanosine-3'-phosphate
  modified_base 14: mod_base = OTHER; note = 2'-O-methyluridine-3'-phosphate
  modified_base 15: mod_base = OTHER; note = 2'-O-methyladenosine-3'-phosphate
  modified_base 16: mod_base = OTHER; note = 2'-O-methyladenosine-3'-phosphate
  modified_base 17: mod_base = OTHER; note = 2'-O-methyladenosine-3'-phosphate
  modified_base 18: mod_base = OTHER; note = 2'-O-methylcytidine-3'-phosphate
  modified_base 19: mod_base = OTHER; note = 2'-O-methyladenosine-3'-phosphate
  modified_base 20: mod_base = OTHER; note = 2'-O-methyladenosine-3'-phosphate
  modified_base 21: mod_base = OTHER; note = 2'-O-methyluridine-3'-phosphate ((2S,4R)-1-[29-[[2-(acetylamino)-2-deoxy-beta-D-galactopyra nosyl]oxy]-14,14-bis[[3-[[3-[[5-[[2-(acetylamino)-2-deoxy-b eta-D-galactopyranosyl]oxy]-1-oxopentyl]amino]propyl]amino] -3-oxopropoxy]methyl]-1,12,19,25-tetraoxo-16-oxa-13,20,24-t riazanonacos-1-yl]-4-hydroxy-2-pyrrolidinyl)methyl ester
cctgtgaaatcagtaaacaat

SEQ ID NO: 374 - RNA, 21 nt, synthetic construct
  source 1..21: mol_type = other RNA
  modified_base 1: mod_base = OTHER; note = 2'-O-methyladenosine-3'-phosphorothioate
  modified_base 2: mod_base = OTHER; note = 2'-O-methyladenosine-3'-phosphorothioate
  modified_base 3: mod_base = OTHER; note = 2'-O-methyluridine-3'-phosphate
  modified_base 4: mod_base = OTHER; note = 2'-O-methyluridine-3'-phosphate
  modified_base 5: mod_base = OTHER; note = 2'-O-methyluridine-3'-phosphate
  modified_base 6: mod_base = OTHER; note = 2'-O-methylcytidine-3'-phosphate
  modified_base 7: mod_base = OTHER; note = 2'-deoxy-2'-fluorouridine-3'-phosphate
  modified_base 8: mod_base = OTHER; note = 2'-O-methylguanosine-3'-phosphate
  modified_base 9: mod_base = OTHER; note = 2'-deoxy-2'-fluoroadenosine-3'-phosphate
  modified_base 10: mod_base = OTHER; note = 2'-deoxy-2'-fluoroadenosine-3'-phosphate
  modified_base 11: mod_base = OTHER; note = 2'-deoxy-2'-fluoroguanosine-3'-phosphate
  modified_base 12: mod_base = OTHER; note = 2'-O-methylguanosine-3'-phosphate
  modified_base 13: mod_base = OTHER; note = 2'-O-methyladenosine-3'-phosphate
  modified_base 14: mod_base = OTHER; note = 2'-O-methyluridine-3'-phosphate
  modified_base 15: mod_base = OTHER; note = 2'-O-methyluridine-3'-phosphate
  modified_base 16: mod_base = OTHER; note = 2'-O-methylguanosine-3'-phosphate
  modified_base 17: mod_base = OTHER; note = 2'-O-methylcytidine-3'-phosphate
  modified_base 18: mod_base = OTHER; note = 2'-O-methylcytidine-3'-phosphate
  modified_base 19: mod_base = OTHER; note = 2'-O-methyladenosine-3'-phosphate
  modified_base 20: mod_base = OTHER; note = 2'-O-methylguanosine-3'-phosphate
  modified_base 21: mod_base = OTHER; note = 2'-O-methyluridine-3'-phosphate ((2S,4R)-1-[29-[[2-(acetylamino)-2-deoxy-beta-D-galactopyra nosyl]oxy]-14,14-bis[[3-[[3-[[5-[[2-(acetylamino)-2-deoxy-b eta-D-galactopyranosyl]oxy]-1-oxopentyl]amino]propyl]amino] -3-oxopropoxy]methyl]-1,12,19,25-tetraoxo-16-oxa-13,20,24-t riazanonacos-1-yl]-4-hydroxy-2-pyrrolidinyl)methyl ester
aatttctgaaggattgccagt

SEQ ID NO: 375 - RNA, 21 nt, synthetic construct
  source 1..21: mol_type = other RNA
  modified_base 1: mod_base = OTHER; note = 2'-O-methyladenosine-3'-phosphorothioate
  modified_base 2: mod_base = OTHER; note = 2'-O-methyluridine-3'-phosphorothioate
  modified_base 3: mod_base = OTHER; note = 2'-O-methyladenosine-3'-phosphate
  modified_base 4: mod_base = OTHER; note = 2'-O-methylguanosine-3'-phosphate
  modified_base 5: mod_base = OTHER; note = 2'-O-methyladenosine-3'-phosphate
  modified_base 6: mod_base = OTHER; note = 2'-O-methylguanosine-3'-phosphate
  modified_base 7: mod_base = OTHER; note = 2'-deoxy-2'-fluorocytidine-3'-phosphate
  modified_base 8: mod_base = OTHER; note = 2'-O-methyluridine-3'-phosphate
  modified_base 9: mod_base = OTHER; note = 2'-deoxy-2'-fluoroguanosine-3'-phosphate
  modified_base 10: mod_base = OTHER; note = 2'-deoxy-2'-fluorouridine-3'-phosphate
  modified_base 11: mod_base = OTHER; note = 2'-deoxy-2'-fluorouridine-3'-phosphate
  modified_base 12: mod_base = OTHER; note = 2'-O-methylguanosine-3'-phosphate
  modified_base 13: mod_base = OTHER; note = 2'-O-methylguanosine-3'-phosphate
  modified_base 14: mod_base = OTHER; note = 2'-O-methylcytidine-3'-phosphate
  modified_base 15: mod_base = OTHER; note = 2'-O-methyluridine-3'-phosphate
  modified_base 16: mod_base = OTHER; note = 2'-O-methyluridine-3'-phosphate
  modified_base 17: mod_base = OTHER; note = 2'-O-methylcytidine-3'-phosphate
  modified_base 18: mod_base = OTHER; note = 2'-O-methyluridine-3'-phosphate
  modified_base 19: mod_base = OTHER; note = 2'-O-methylcytidine-3'-phosphate
  modified_base 20: mod_base = OTHER; note = 2'-O-methyluridine-3'-phosphate
  modified_base 21: mod_base = OTHER; note = 2'-O-methyluridine-3'-phosphate ((2S,4R)-1-[29-[[2-(acetylamino)-2-deoxy-beta-D-galactopyra nosyl]oxy]-14,14-bis[[3-[[3-[[5-[[2-(acetylamino)-2-deoxy-b eta-D-galactopyranosyl]oxy]-1-oxopentyl]amino]propyl]amino] -3-oxopropoxy]methyl]-1,12,19,25-tetraoxo-16-oxa-13,20,24-t riazanonacos-1-yl]-4-hydroxy-2-pyrrolidinyl)methyl ester
atagagctgttggcttctctt

SEQ ID NO: 376 - RNA, 21 nt, synthetic construct
  source 1..21: mol_type = other RNA
  modified_base 1: mod_base = OTHER; note = 2'-O-methyladenosine-3'-phosphorothioate
  modified_base 2: mod_base = OTHER; note = 2'-O-methylguanosine-3'-phosphorothioate
  modified_base 3: mod_base = OTHER; note = 2'-O-methyluridine-3'-phosphate
  modified_base 4: mod_base = OTHER; note = 2'-O-methylguanosine-3'-phosphate
  modified_base 5: mod_base = OTHER; note = 2'-O-methylguanosine-3'-phosphate
  modified_base 6: mod_base = OTHER; note = 2'-O-methyladenosine-3'-phosphate
  modified_base 7: mod_base = OTHER; note = 2'-deoxy-2'-fluoroadenosine-3'-phosphate
  modified_base 8: mod_base = OTHER; note = 2'-O-methylguanosine-3'-phosphate
  modified_base 9: mod_base = OTHER; note = 2'-deoxy-2'-fluoroadenosine-3'-phosphate
  modified_base 10: mod_base = OTHER; note = 2'-deoxy-2'-fluoroadenosine-3'-phosphate
  modified_base 11: mod_base = OTHER; note = 2'-deoxy-2'-fluoroguanosine-3'-phosphate
  modified_base 12: mod_base = OTHER; note = 2'-O-methyladenosine-3'-phosphate
  modified_base 13: mod_base = OTHER; note = 2'-O-methyladenosine-3'-phosphate
  modified_base 14: mod_base = OTHER; note = 2'-O-methyladenosine-3'-phosphate
  modified_base 15: mod_base = OTHER; note = 2'-O-methyladenosine-3'-phosphate
  modified_base 16: mod_base = OTHER; note = 2'-O-methylcytidine-3'-phosphate
  modified_base 17: mod_base = OTHER; note = 2'-O-methyladenosine-3'-phosphate
  modified_base 18: mod_base = OTHER; note = 2'-O-methylcytidine-3'-phosphate
  modified_base 19: mod_base = OTHER; note = 2'-O-methyluridine-3'-phosphate
  modified_base 20: mod_base = OTHER; note = 2'-O-methyladenosine-3'-phosphate
  modified_base 21: mod_base = OTHER; note = 2'-O-methyluridine-3'-phosphate ((2S,4R)-1-[29-[[2-(acetylamino)-2-deoxy-beta-D-galactopyra nosyl]oxy]-14,14-bis[[3-[[3-[[5-[[2-(acetylamino)-2-deoxy-b eta-D-galactopyranosyl]oxy]-1-oxopentyl]amino]propyl]amino] -3-oxopropoxy]methyl]-1,12,19,25-tetraoxo-16-oxa-13,20,24-t riazanonacos-1-yl]-4-hydroxy-2-pyrrolidinyl)methyl ester
agtggaagaagaaaacactat

SEQ ID NO: 377 - RNA, 21 nt, synthetic construct
  source 1..21: mol_type = other RNA
  modified_base 1: mod_base = OTHER; note = 2'-O-methyladenosine-3'-phosphorothioate
  modified_base 2: mod_base = OTHER; note = 2'-O-methyladenosine-3'-phosphorothioate
  modified_base 3: mod_base = OTHER; note = 2'-O-methyladenosine-3'-phosphate
  modified_base 4: mod_base = OTHER; note = 2'-O-methylcytidine-3'-phosphate
  modified_base 5: mod_base = OTHER; note = 2'-O-methyladenosine-3'-phosphate
  modified_base 6: mod_base = OTHER; note = 2'-O-methylcytidine-3'-phosphate
  modified_base 7: mod_base = OTHER; note = 2'-deoxy-2'-fluorouridine-3'-phosphate
  modified_base 8: mod_base = OTHER; note = 2'-O-methyladenosine-3'-phosphate
  modified_base 9: mod_base = OTHER; note = 2'-deoxy-2'-fluoroguanosine-3'-phosphate
  modified_base 10: mod_base = OTHER; note = 2'-deoxy-2'-fluorouridine-3'-phosphate
  modified_base 11: mod_base = OTHER; note = 2'-deoxy-2'-fluoroadenosine-3'-phosphate
  modified_base 12: mod_base = OTHER; note = 2'-O-methylcytidine-3'-phosphate
  modified_base 13: mod_base = OTHER; note = 2'-O-methylcytidine-3'-phosphate
  modified_base 14: mod_base = OTHER; note = 2'-O-methyluridine-3'-phosphate
  modified_base 15: mod_base = OTHER; note = 2'-O-methyluridine-3'-phosphate
  modified_base 16: mod_base = OTHER; note = 2'-O-methylcytidine-3'-phosphate
  modified_base 17: mod_base = OTHER; note = 2'-O-methyladenosine-3'-phosphate
  modified_base 18: mod_base = OTHER; note = 2'-O-methylguanosine-3'-phosphate
  modified_base 19: mod_base = OTHER; note = 2'-O-methyladenosine-3'-phosphate
  modified_base 20: mod_base = OTHER; note = 2'-O-methyluridine-3'-phosphate
  modified_base 21: mod_base = OTHER; note = 2'-O-methyluridine-3'-phosphate ((2S,4R)-1-[29-[[2-(acetylamino)-2-deoxy-beta-D-galactopyra nosyl]oxy]-14,14-bis[[3-[[3-[[5-[[2-(acetylamino)-2-deoxy-b eta-D-galactopyranosyl]oxy]-1-oxopentyl]amino]propyl]amino] -3-oxopropoxy]methyl]-1,12,19,25-tetraoxo-16-oxa-13,20,24-t riazanonacos-1-yl]-4-hydroxy-2-pyrrolidinyl)methyl ester
aaacactagtaccttcagatt

SEQ ID NO: 378 - RNA, 21 nt, synthetic construct
  source 1..21: mol_type = other RNA
  modified_base 1: mod_base = OTHER; note = 2'-O-methylcytidine-3'-phosphorothioate
  modified_base 2: mod_base = OTHER; note = 2'-O-methyluridine-3'-phosphorothioate
  modified_base 3: mod_base = OTHER; note = 2'-O-methylguanosine-3'-phosphate
  modified_base 4: mod_base = OTHER; note = 2'-O-methyladenosine-3'-phosphate
  modified_base 5: mod_base = OTHER; note = 2'-O-methyladenosine-3'-phosphate
  modified_base 6: mod_base = OTHER; note = 2'-O-methylguanosine-3'-phosphate
  modified_base 7: mod_base = OTHER; note = 2'-deoxy-2'-fluoroadenosine-3'-phosphate
  modified_base 8: mod_base = OTHER; note = 2'-O-methyluridine-3'-phosphate
  modified_base 9: mod_base = OTHER; note = 2'-deoxy-2'-fluoroadenosine-3'-phosphate
  modified_base 10: mod_base = OTHER; note = 2'-deoxy-2'-fluoroadenosine-3'-phosphate
  modified_base 11: mod_base = OTHER; note = 2'-deoxy-2'-fluorouridine-3'-phosphate
  modified_base 12: mod_base = OTHER; note = 2'-O-methylcytidine-3'-phosphate
  modified_base 13: mod_base = OTHER; note = 2'-O-methyluridine-3'-phosphate
  modified_base 14: mod_base = OTHER; note = 2'-O-methyluridine-3'-phosphate
  modified_base 15: mod_base = OTHER; note = 2'-O-methyladenosine-3'-phosphate
  modified_base 16: mod_base = OTHER; note = 2'-O-methylguanosine-3'-phosphate
  modified_base 17: mod_base = OTHER; note = 2'-O-methylcytidine-3'-phosphate
  modified_base 18: mod_base = OTHER; note = 2'-O-methyluridine-3'-phosphate
  modified_base 19: mod_base = OTHER; note = 2'-O-methylguanosine-3'-phosphate
  modified_base 20: mod_base = OTHER; note = 2'-O-methylcytidine-3'-phosphate
  modified_base 21: mod_base = OTHER; note = 2'-O-methyluridine-3'-phosphate ((2S,4R)-1-[29-[[2-(acetylamino)-2-deoxy-beta-D-galactopyra nosyl]oxy]-14,14-bis[[3-[[3-[[5-[[2-(acetylamino)-2-deoxy-b eta-D-galactopyranosyl]oxy]-1-oxopentyl]amino]propyl]amino] -3-oxopropoxy]methyl]-1,12,19,25-tetraoxo-16-oxa-13,20,24-t riazanonacos-1-yl]-4-hydroxy-2-pyrrolidinyl)methyl ester
ctgaagataatcttagctgct

SEQ ID NO: 379 - RNA, 21 nt, synthetic construct
  source 1..21: mol_type = other RNA
  modified_base 1: mod_base = OTHER; note = 2'-O-methylcytidine-3'-phosphorothioate
  modified_base 2: mod_base = OTHER; note = 2'-O-methyluridine-3'-phosphorothioate
  modified_base 3: mod_base = OTHER; note = 2'-O-methylguanosine-3'-phosphate
  modified_base 4: mod_base = OTHER; note = 2'-O-methylcytidine-3'-phosphate
  modified_base 5: mod_base = OTHER; note = 2'-O-methylcytidine-3'-phosphate
  modified_base 6: mod_base = OTHER; note = 2'-O-methyladenosine-3'-phosphate
  modified_base 7: mod_base = OTHER; note = 2'-deoxy-2'-fluoroadenosine-3'-phosphate
  modified_base 8: mod_base = OTHER; note = 2'-O-methylguanosine-3'-phosphate
  modified_base 9: mod_base = OTHER; note = 2'-deoxy-2'-fluorouridine-3'-phosphate
  modified_base 10: mod_base = OTHER; note = 2'-deoxy-2'-fluoroadenosine-3'-phosphate
  modified_base 11: mod_base = OTHER; note = 2'-deoxy-2'-fluoroadenosine-3'-phosphate
  modified_base 12: mod_base = OTHER; note = 2'-O-methyladenosine-3'-phosphate
  modified_base 13: mod_base = OTHER; note = 2'-O-methyluridine-3'-phosphate
  modified_base 14: mod_base = OTHER; note = 2'-O-methyladenosine-3'-phosphate
  modified_base 15: mod_base = OTHER; note = 2'-O-methylguanosine-3'-phosphate
  modified_base 16: mod_base = OTHER; note = 2'-O-methylcytidine-3'-phosphate
  modified_base 17: mod_base = OTHER; note = 2'-O-methyladenosine-3'-phosphate
  modified_base 18: mod_base = OTHER; note = 2'-O-methyladenosine-3'-phosphate
  modified_base 19: mod_base = OTHER; note = 2'-O-methylcytidine-3'-phosphate
  modified_base 20: mod_base = OTHER; note = 2'-O-methyladenosine-3'-phosphate
  modified_base 21: mod_base = OTHER; note = 2'-O-methyluridine-3'-phosphate ((2S,4R)-1-[29-[[2-(acetylamino)-2-deoxy-beta-D-galactopyra nosyl]oxy]-14,14-bis[[3-[[3-[[5-[[2-(acetylamino)-2-deoxy-b eta-D-galactopyranosyl]oxy]-1-oxopentyl]amino]propyl]amino] -3-oxopropoxy]methyl]-1,12,19,25-tetraoxo-16-oxa-13,20,24-t riazanonacos-1-yl]-4-hydroxy-2-pyrrolidinyl)methyl ester
ctgccaagtaaatagcaacat

SEQ ID NO: 380 - RNA, 21 nt, synthetic construct
  source 1..21: mol_type = other RNA
  modified_base 1: mod_base = OTHER; note = 2'-O-methyluridine-3'-phosphorothioate
  modified_base 2: mod_base = OTHER; note = 2'-O-methyluridine-3'-phosphorothioate
  modified_base 3: mod_base = OTHER; note = 2'-O-methylcytidine-3'-phosphate
  modified_base 4: mod_base = OTHER; note = 2'-O-methyladenosine-3'-phosphate
  modified_base 5: mod_base = OTHER; note = 2'-O-methyluridine-3'-phosphate
  modified_base 6: mod_base = OTHER; note = 2'-O-methylguanosine-3'-phosphate
  modified_base 7: mod_base = OTHER; note = 2'-deoxy-2'-fluoroadenosine-3'-phosphate
  modified_base 8: mod_base = OTHER; note = 2'-O-methyladenosine-3'-phosphate
  modified_base 9: mod_base = OTHER; note = 2'-deoxy-2'-fluoroadenosine-3'-phosphate
  modified_base 10: mod_base = OTHER; note = 2'-deoxy-2'-fluoroadenosine-3'-phosphate
  modified_base 11: mod_base = OTHER; note = 2'-deoxy-2'-fluorouridine-3'-phosphate
  modified_base 12: mod_base = OTHER; note = 2'-O-methylcytidine-3'-phosphate
  modified_base 13: mod_base = OTHER; note = 2'-O-methylcytidine-3'-phosphate
  modified_base 14: mod_base = OTHER; note = 2'-O-methyluridine-3'-phosphate
  modified_base 15: mod_base = OTHER; note = 2'-O-methyladenosine-3'-phosphate
  modified_base 16: mod_base = OTHER; note = 2'-O-methylcytidine-3'-phosphate
  modified_base 17: mod_base = OTHER; note = 2'-O-methylcytidine-3'-phosphate
  modified_base 18: mod_base = OTHER; note = 2'-O-methyladenosine-3'-phosphate
  modified_base 19: mod_base = OTHER; note = 2'-O-methyladenosine-3'-phosphate
  modified_base 20: mod_base = OTHER; note = 2'-O-methylcytidine-3'-phosphate
  modified_base 21: mod_base = OTHER; note = 2'-O-methyluridine-3'-phosphate ((2S,4R)-1-[29-[[2-(acetylamino)-2-deoxy-beta-D-galactopyra nosyl]oxy]-14,14-bis[[3-[[3-[[5-[[2-(acetylamino)-2-deoxy-b eta-D-galactopyranosyl]oxy]-1-oxopentyl]amino]propyl]amino] -3-oxopropoxy]methyl]-1,12,19,25-tetraoxo-16-oxa-13,20,24-t riazanonacos-1-yl]-4-hydroxy-2-pyrrolidinyl)methyl ester
ttcatgaaaatcctaccaact

SEQ ID NO: 381 - RNA, 21 nt, synthetic construct
  source 1..21: mol_type = other RNA
  modified_base 1: mod_base = OTHER; note = 2'-O-methyluridine-3'-phosphorothioate
  modified_base 2: mod_base = OTHER; note = 2'-O-methylcytidine-3'-phosphorothioate
  modified_base 3: mod_base = OTHER; note = 2'-O-methyluridine-3'-phosphate
  modified_base 4: mod_base = OTHER; note = 2'-O-methylguanosine-3'-phosphate
  modified_base 5: mod_base = OTHER; note = 2'-O-methyladenosine-3'-phosphate
  modified_base 6: mod_base = OTHER; note = 2'-O-methyladenosine-3'-phosphate
  modified_base 7: mod_base = OTHER; note = 2'-deoxy-2'-fluoroguanosine-3'-phosphate
  modified_base 8: mod_base = OTHER; note = 2'-O-methyluridine-3'-phosphate
  modified_base 9: mod_base = OTHER; note = 2'-deoxy-2'-fluorocytidine-3'-phosphate
  modified_base 10: mod_base = OTHER; note = 2'-deoxy-2'-fluorouridine-3'-phosphate
  modified_base 11: mod_base = OTHER; note = 2'-deoxy-2'-fluorocytidine-3'-phosphate
  modified_base 12: mod_base = OTHER; note = 2'-O-methyluridine-3'-phosphate
  modified_base 13: mod_base = OTHER; note = 2'-O-methyluridine-3'-phosphate
  modified_base 14: mod_base = OTHER; note = 2'-O-methylcytidine-3'-phosphate
  modified_base 15: mod_base = OTHER; note = 2'-O-methyluridine-3'-phosphate
  modified_base 16: mod_base = OTHER; note = 2'-O-methylcytidine-3'-phosphate
  modified_base 17: mod_base = OTHER; note = 2'-O-methyluridine-3'-phosphate
  modified_base 18: mod_base = OTHER; note = 2'-O-methylcytidine-3'-phosphate
  modified_base 19: mod_base = OTHER; note = 2'-O-methyluridine-3'-phosphate
  modified_base 20: mod_base = OTHER; note = 2'-O-methyluridine-3'-phosphate
  modified_base 21: mod_base = OTHER; note = 2'-O-methyluridine-3'-phosphate ((2S,4R)-1-[29-[[2-(acetylamino)-2-deoxy-beta-D-galactopyra nosyl]oxy]-14,14-bis[[3-[[3-[[5-[[2-(acetylamino)-2-deoxy-b eta-D-galactopyranosyl]oxy]-1-oxopentyl]amino]propyl]amino] -3-oxopropoxy]methyl]-1,12,19,25-tetraoxo-16-oxa-13,20,24-t riazanonacos-1-yl]-4-hydroxy-2-pyrrolidinyl)methyl ester
tctgaagtctcttctctcttt

SEQ ID NO: 382 - RNA, 21 nt, synthetic construct
  source 1..21: mol_type = other RNA
  modified_base 1: mod_base = OTHER; note = 2'-O-methyluridine-3'-phosphorothioate
  modified_base 2: mod_base = OTHER; note = 2'-O-methylcytidine-3'-phosphorothioate
  modified_base 3: mod_base = OTHER; note = 2'-O-methyluridine-3'-phosphate
  modified_base 4: mod_base = OTHER; note = 2'-O-methylcytidine-3'-phosphate
  modified_base 5: mod_base = OTHER; note = 2'-O-methyluridine-3'-phosphate
  modified_base 6: mod_base = OTHER; note = 2'-O-methylcytidine-3'-phosphate
  modified_base 7: mod_base = OTHER; note = 2'-deoxy-2'-fluorouridine-3'-phosphate
  modified_base 8: mod_base = OTHER; note = 2'-O-methyluridine-3'-phosphate
  modified_base 9: mod_base = OTHER; note = 2'-deoxy-2'-fluoroadenosine-3'-phosphate
  modified_base 10: mod_base = OTHER; note = 2'-deoxy-2'-fluoroguanosine-3'-phosphate
  modified_base 11: mod_base = OTHER; note = 2'-deoxy-2'-fluoroguanosine-3'-phosphate
  modified_base 12: mod_base = OTHER; note = 2'-O-methyluridine-3'-phosphate
  modified_base 13: mod_base = OTHER; note = 2'-O-methylcytidine-3'-phosphate
  modified_base 14: mod_base = OTHER; note = 2'-O-methyluridine-3'-phosphate
  modified_base 15: mod_base = OTHER; note = 2'-O-methyladenosine-3'-phosphate
  modified_base 16: mod_base = OTHER; note = 2'-O-methyluridine-3'-phosphate
  modified_base 17: mod_base = OTHER; note = 2'-O-methyladenosine-3'-phosphate
  modified_base 18: mod_base = OTHER; note = 2'-O-methyladenosine-3'-phosphate
  modified_base 19: mod_base = OTHER; note = 2'-O-methyluridine-3'-phosphate
  modified_base 20: mod_base = OTHER; note = 2'-O-methyluridine-3'-phosphate
  modified_base 21: mod_base = OTHER; note = 2'-O-methyluridine-3'-phosphate ((2S,4R)-1-[29-[[2-(acetylamino)-2-deoxy-beta-D-galactopyra nosyl]oxy]-14,14-bis[[3-[[3-[[5-[[2-(acetylamino)-2-deoxy-b eta-D-galactopyranosyl]oxy]-1-oxopentyl]amino]propyl]amino] -3-oxopropoxy]methyl]-1,12,19,25-tetraoxo-16-oxa-13,20,24-t riazanonacos-1-yl]-4-hydroxy-2-pyrrolidinyl)methyl ester
tctctcttaggtctataattt

SEQ ID NO: 383 - RNA, 21 nt, synthetic construct
  source 1..21: mol_type = other RNA
  modified_base 1: mod_base = OTHER; note = 2'-O-methylcytidine-3'-phosphorothioate
  modified_base 2: mod_base = OTHER; note = 2'-O-methyluridine-3'-phosphorothioate
  modified_base 3: mod_base = OTHER; note = 2'-O-methyluridine-3'-phosphate
  modified_base 4: mod_base = OTHER; note = 2'-O-methylcytidine-3'-phosphate
  modified_base 5: mod_base = OTHER; note = 2'-O-methylcytidine-3'-phosphate
  modified_base 6: mod_base = OTHER; note = 2'-O-methyluridine-3'-phosphate
  modified_base 7: mod_base = OTHER; note = 2'-deoxy-2'-fluorouridine-3'-phosphate
  modified_base 8: mod_base = OTHER; note = 2'-O-methyladenosine-3'-phosphate
  modified_base 9: mod_base = OTHER; note = 2'-deoxy-2'-fluoroadenosine-3'-phosphate
  modified_base 10: mod_base = OTHER; note = 2'-deoxy-2'-fluoroadenosine-3'-phosphate
  modified_base 11: mod_base = OTHER; note = 2'-deoxy-2'-fluorocytidine-3'-phosphate
  modified_base 12: mod_base = OTHER; note = 2'-O-methyluridine-3'-phosphate
  modified_base 13: mod_base = OTHER; note = 2'-O-methylcytidine-3'-phosphate
  modified_base 14: mod_base = OTHER; note = 2'-O-methylcytidine-3'-phosphate
  modified_base 15: mod_base = OTHER; note = 2'-O-methyluridine-3'-phosphate
  modified_base 16: mod_base = OTHER; note = 2'-O-methylguanosine-3'-phosphate
  modified_base 17: mod_base = OTHER; note = 2'-O-methyluridine-3'-phosphate
  modified_base 18: mod_base = OTHER; note = 2'-O-methylguanosine-3'-phosphate
  modified_base 19: mod_base = OTHER; note = 2'-O-methyladenosine-3'-phosphate
  modified_base 20: mod_base = OTHER; note = 2'-O-methyluridine-3'-phosphate
  modified_base 21: mod_base = OTHER; note = 2'-O-methyluridine-3'-phosphate ((2S,4R)-1-[29-[[2-(acetylamino)-2-deoxy-beta-D-galactopyra nosyl]oxy]-14,14-bis[[3-[[3-[[5-[[2-(acetylamino)-2-deoxy-b eta-D-galactopyranosyl]oxy]-1-oxopentyl]amino]propyl]amino] -3-oxopropoxy]methyl]-1,12,19,25-tetraoxo-16-oxa-13,20,24-t riazanonacos-1-yl]-4-hydroxy-2-pyrrolidinyl)methyl ester
cttccttaaactcctgtgatt

SEQ ID NO: 384 - RNA, 21 nt, synthetic construct
  source 1..21: mol_type = other RNA
  modified_base 1: mod_base = OTHER; note = 2'-O-methylcytidine-3'-phosphorothioate
  modified_base 2: mod_base = OTHER; note = 2'-O-methylcytidine-3'-phosphorothioate
  modified_base 3: mod_base = OTHER; note = 2'-O-methyluridine-3'-phosphate
  modified_base 4: mod_base = OTHER; note = 2'-O-methyladenosine-3'-phosphate
  modified_base 5: mod_base = OTHER; note = 2'-O-methyladenosine-3'-phosphate
  modified_base 6: mod_base = OTHER; note = 2'-O-methyluridine-3'-phosphate
  modified_base 7: mod_base = OTHER; note = 2'-deoxy-2'-fluoroguanosine-3'-phosphate
  modified_base 8: mod_base = OTHER; note = 2'-O-methyladenosine-3'-phosphate
  modified_base 9: mod_base = OTHER; note = 2'-deoxy-2'-fluoroguanosine-3'-phosphate
  modified_base 10: mod_base = OTHER; note = 2'-deoxy-2'-fluoroadenosine-3'-phosphate
  modified_base 11: mod_base = OTHER; note = 2'-deoxy-2'-fluoroadenosine-3'-phosphate
  modified_base 12: mod_base = OTHER; note = 2'-O-methylguanosine-3'-phosphate
  modified_base 13: mod_base = OTHER; note = 2'-O-methyluridine-3'-phosphate
  modified_base 14: mod_base = OTHER; note = 2'-O-methylcytidine-3'-phosphate
  modified_base 15: mod_base = OTHER; note = 2'-O-methyladenosine-3'-phosphate
  modified_base 16: mod_base = OTHER; note = 2'-O-methyladenosine-3'-phosphate
  modified_base 17: mod_base = OTHER; note = 2'-O-methylcytidine-3'-phosphate
  modified_base 18: mod_base = OTHER; note = 2'-O-methyladenosine-3'-phosphate
  modified_base 19: mod_base = OTHER; note = 2'-O-methylguanosine-3'-phosphate
  modified_base 20: mod_base = OTHER; note = 2'-O-methyluridine-3'-phosphate
  modified_base 21: mod_base = OTHER; note = 2'-O-methyluridine-3'-phosphate ((2S,4R)-1-[29-[[2-(acetylamino)-2-deoxy-beta-D-galactopyra nosyl]oxy]-14,14-bis[[3-[[3-[[5-[[2-(acetylamino)-2-deoxy-b eta-D-galactopyranosyl]oxy]-1-oxopentyl]amino]propyl]amino] -3-oxopropoxy]methyl]-1,12,19,25-tetraoxo-16-oxa-13,20,24-t riazanonacos-1-yl]-4-hydroxy-2-pyrrolidinyl)methyl ester
cctaatgagaagtcaacagtt

SEQ ID NO: 385 - RNA, 21 nt, synthetic construct
  source 1..21: mol_type = other RNA
  modified_base 1: mod_base = OTHER; note = 2'-O-methyladenosine-3'-phosphorothioate
  modified_base 2: mod_base = OTHER; note = 2'-O-methyladenosine-3'-phosphorothioate
  modified_base 3: mod_base = OTHER; note = 2'-O-methylcytidine-3'-phosphate
  modified_base 4: mod_base = OTHER; note = 2'-O-methyladenosine-3'-phosphate
  modified_base 5: mod_base = OTHER; note = 2'-O-methylguanosine-3'-phosphate
  modified_base 6: mod_base = OTHER; note = 2'-O-methyluridine-3'-phosphate
  modified_base 7: mod_base = OTHER; note = 2'-deoxy-2'-fluoroguanosine-3'-phosphate
  modified_base 8: mod_base = OTHER; note = 2'-O-methyladenosine-3'-phosphate
  modified_base 9: mod_base = OTHER; note = 2'-deoxy-2'-fluoroadenosine-3'-phosphate
  modified_base 10: mod_base = OTHER; note = 2'-deoxy-2'-fluoroadenosine-3'-phosphate
  modified_base 11: mod_base = OTHER; note = 2'-deoxy-2'-fluorouridine-3'-phosphate
  modified_base 12: mod_base = OTHER; note = 2'-O-methyladenosine-3'-phosphate
  modified_base 13: mod_base = OTHER; note = 2'-O-methylcytidine-3'-phosphate
  modified_base 14: mod_base = OTHER; note = 2'-O-methylguanosine-3'-phosphate
  modified_base 15: mod_base = OTHER; note = 2'-O-methylcytidine-3'-phosphate
  modified_base 16: mod_base = OTHER; note = 2'-O-methylcytidine-3'-phosphate
  modified_base 17: mod_base = OTHER; note = 2'-O-methyladenosine-3'-phosphate
  modified_base 18: mod_base = OTHER; note = 2'-O-methylguanosine-3'-phosphate
  modified_base 19: mod_base = OTHER; note = 2'-O-methyladenosine-3'-phosphate
  modified_base 20: mod_base = OTHER; note = 2'-O-methyladenosine-3'-phosphate
  modified_base 21: mod_base = OTHER; note = 2'-O-methyluridine-3'-phosphate ((2S,4R)-1-[29-[[2-(acetylamino)-2-deoxy-beta-D-galactopyra nosyl]oxy]-14,14-bis[[3-[[3-[[5-[[2-(acetylamino)-2-deoxy-b eta-D-galactopyranosyl]oxy]-1-oxopentyl]amino]propyl]amino] -3-oxopropoxy]methyl]-1,12,19,25-tetraoxo-16-oxa-13,20,24-t riazanonacos-1-yl]-4-hydroxy-2-pyrrolidinyl)methyl ester
aacagtgaaatacgccagaat

SEQ ID NO: 386 - RNA, 21 nt, synthetic construct
  source 1..21: mol_type = other RNA
  modified_base 1: mod_base = OTHER; note = 2'-O-methylcytidine-3'-phosphorothioate
  modified_base 2: mod_base = OTHER; note = 2'-O-methylguanosine-3'-phosphorothioate
  modified_base 3: mod_base = OTHER; note = 2'-O-methylcytidine-3'-phosphate
  modified_base 4: mod_base = OTHER; note = 2'-O-methylcytidine-3'-phosphate
  modified_base 5: mod_base = OTHER; note = 2'-O-methyladenosine-3'-phosphate
  modified_base 6: mod_base = OTHER; note = 2'-O-methylguanosine-3'-phosphate
  modified_base 7: mod_base = OTHER; note = 2'-deoxy-2'-fluoroadenosine-3'-phosphate
  modified_base 8: mod_base = OTHER; note = 2'-O-methyladenosine-3'-phosphate
  modified_base 9: mod_base = OTHER; note = 2'-deoxy-2'-fluorocytidine-3'-phosphate
  modified_base 10: mod_base = OTHER; note = 2'-deoxy-2'-fluorouridine-3'-phosphate
  modified_base 11: mod_base = OTHER; note = 2'-deoxy-2'-fluoroguanosine-3'-phosphate
  modified_base 12: mod_base = OTHER; note = 2'-O-methylcytidine-3'-phosphate
  modified_base 13: mod_base = OTHER; note = 2'-O-methyluridine-3'-phosphate
  modified_base 14: mod_base = OTHER; note = 2'-O-methyluridine-3'-phosphate
  modified_base 15: mod_base = OTHER; note = 2'-O-methyluridine-3'-phosphate
  modified_base 16: mod_base = OTHER; note = 2'-O-methyladenosine-3'-phosphate
  modified_base 17: mod_base = OTHER; note = 2'-O-methyluridine-3'-phosphate
  modified_base 18: mod_base = OTHER; note = 2'-O-methylcytidine-3'-phosphate
  modified_base 19: mod_base = OTHER; note = 2'-O-methylcytidine-3'-phosphate
  modified_base 20: mod_base = OTHER; note = 2'-O-methylcytidine-3'-phosphate
  modified_base 21: mod_base = OTHER; note = 2'-O-methyluridine-3'-phosphate ((2S,4R)-1-[29-[[2-(acetylamino)-2-deoxy-beta-D-galactopyra nosyl]oxy]-14,14-bis[[3-[[3-[[5-[[2-(acetylamino)-2-deoxy-b eta-D-galactopyranosyl]oxy]-1-oxopentyl]amino]propyl]amino] -3-oxopropoxy]methyl]-1,12,19,25-tetraoxo-16-oxa-13,20,24-t riazanonacos-1-yl]-4-hydroxy-2-pyrrolidinyl)methyl ester
cgccagaactgctttatccct

SEQ ID NO: 387 - RNA, 21 nt, synthetic construct
  source 1..21: mol_type = other RNA
  modified_base 1: mod_base = OTHER; note = 2'-O-methyluridine-3'-phosphorothioate
  modified_base 2: mod_base = OTHER; note = 2'-O-methyluridine-3'-phosphorothioate
  modified_base 3: mod_base = OTHER; note = 2'-O-methyladenosine-3'-phosphate
  modified_base 4: mod_base = OTHER; note = 2'-O-methyluridine-3'-phosphate
  modified_base 5: mod_base = OTHER; note = 2'-O-methylcytidine-3'-phosphate
  modified_base 6: mod_base = OTHER; note = 2'-O-methylcytidine-3'-phosphate
  modified_base 7: mod_base = OTHER; note = 2'-deoxy-2'-fluorocytidine-3'-phosphate
  modified_base 8: mod_base = OTHER; note = 2'-O-methyladenosine-3'-phosphate
  modified_base 9: mod_base = OTHER; note = 2'-deoxy-2'-fluorocytidine-3'-phosphate
  modified_base 10: mod_base = OTHER; note = 2'-deoxy-2'-fluoroguanosine-3'-phosphate
  modified_base 11: mod_base = OTHER; note = 2'-deoxy-2'-fluoroguanosine-3'-phosphate
  modified_base 12: mod_base = OTHER; note = 2'-O-methyladenosine-3'-phosphate
  modified_base 13: mod_base = OTHER; note = 2'-O-methyladenosine-3'-phosphate
  modified_base 14: mod_base = OTHER; note = 2'-O-methyladenosine-3'-phosphate
  modified_base 15: mod_base = OTHER; note = 2'-O-methyladenosine-3'-phosphate
  modified_base 16: mod_base = OTHER; note = 2'-O-methyluridine-3'-phosphate
  modified_base 17: mod_base = OTHER; note = 2'-O-methylguanosine-3'-phosphate
  modified_base 18: mod_base = OTHER; note = 2'-O-methylcytidine-3'-phosphate
  modified_base 19: mod_base = OTHER; note = 2'-O-methylcytidine-3'-phosphate
  modified_base 20: mod_base = OTHER; note = 2'-O-methyladenosine-3'-phosphate
  modified_base 21: mod_base = OTHER; note = 2'-O-methyluridine-3'-phosphate ((2S,4R)-1-[29-[[2-(acetylamino)-2-deoxy-beta-D-galactopyra nosyl]oxy]-14,14-bis[[3-[[3-[[5-[[2-(acetylamino)-2-deoxy-b eta-D-galactopyranosyl]oxy]-1-oxopentyl]amino]propyl]amino] -3-oxopropoxy]methyl]-1,12,19,25-tetraoxo-16-oxa-13,20,24-t riazanonacos-1-yl]-4-hydroxy-2-pyrrolidinyl)methyl ester
ttatcccacggaaaatgccat

SEQ ID NO: 388 - RNA, 21 nt, synthetic construct
  source 1..21: mol_type = other RNA
  modified_base 1: mod_base = OTHER; note = 2'-O-methyladenosine-3'-phosphorothioate
  modified_base 2: mod_base = OTHER; note = 2'-O-methyladenosine-3'-phosphorothioate
  modified_base 3: mod_base = OTHER; note = 2'-O-methyladenosine-3'-phosphate
  modified_base 4: mod_base = OTHER; note = 2'-O-methyluridine-3'-phosphate
  modified_base 5: mod_base = OTHER; note = 2'-O-methylguanosine-3'-phosphate
  modified_base 6: mod_base = OTHER; note = 2'-O-methylcytidine-3'-phosphate
  modified_base 7: mod_base = OTHER; note = 2'-deoxy-2'-fluorocytidine-3'-phosphate
  modified_base 8: mod_base = OTHER; note = 2'-O-methyladenosine-3'-phosphate
  modified_base 9: mod_base = OTHER; note = 2'-deoxy-2'-fluoroadenosine-3'-phosphate
  modified_base 10: mod_base = OTHER; note = 2'-deoxy-2'-fluorouridine-3'-phosphate
  modified_base 11: mod_base = OTHER; note = 2'-deoxy-2'-fluorocytidine-3'-phosphate
  modified_base 12: mod_base = OTHER; note = 2'-O-methyluridine-3'-phosphate
  modified_base 13: mod_base = OTHER; note = 2'-O-methylcytidine-3'-phosphate
  modified_base 14: mod_base = OTHER; note = 2'-O-methyluridine-3'-phosphate
  modified_base 15: mod_base = OTHER; note = 2'-O-methyluridine-3'-phosphate
  modified_base 16: mod_base = OTHER; note = 2'-O-methylcytidine-3'-phosphate
  modified_base 17: mod_base = OTHER; note = 2'-O-methyluridine-3'-phosphate
  modified_base 18: mod_base = OTHER; note = 2'-O-methyladenosine-3'-phosphate
  modified_base 19: mod_base = OTHER; note = 2'-O-methyladenosine-3'-phosphate
  modified_base 20: mod_base = OTHER; note = 2'-O-methyladenosine-3'-phosphate
  modified_base 21: mod_base = OTHER; note = 2'-O-methyluridine-3'-phosphate ((2S,4R)-1-[29-[[2-(acetylamino)-2-deoxy-beta-D-galactopyra nosyl]oxy]-14,14-bis[[3-[[3-[[5-[[2-(acetylamino)-2-deoxy-b eta-D-galactopyranosyl]oxy]-1-oxopentyl]amino]propyl]amino] -3-oxopropoxy]methyl]-1,12,19,25-tetraoxo-16-oxa-13,20,24-t riazanonacos-1-yl]-4-hydroxy-2-pyrrolidinyl)methyl ester
aaatgccaatctcttctaaat

SEQ ID NO: 389 - RNA, 21 nt, synthetic construct
  source 1..21: mol_type = other RNA
  modified_base 1: mod_base = OTHER; note = 2'-O-methyluridine-3'-phosphorothioate
  modified_base 2: mod_base = OTHER; note = 2'-O-methyluridine-3'-phosphorothioate
  modified_base 3: mod_base = OTHER; note = 2'-O-methylcytidine-3'-phosphate
  modified_base 4: mod_base = OTHER; note = 2'-O-methyladenosine-3'-phosphate
  modified_base 5: mod_base = OTHER; note = 2'-O-methyladenosine-3'-phosphate
  modified_base 6: mod_base = OTHER; note = 2'-O-methyladenosine-3'-phosphate
  modified_base 7: mod_base = OTHER; note = 2'-deoxy-2'-fluoroguanosine-3'-phosphate
  modified_base 8: mod_base = OTHER; note = 2'-O-methyluridine-3'-phosphate
  modified_base 9: mod_base = OTHER; note = 2'-deoxy-2'-fluoroadenosine-3'-phosphate
  modified_base 10: mod_base = OTHER; note = 2'-deoxy-2'-fluoroadenosine-3'-phosphate
  modified_base 11: mod_base = OTHER; note = 2'-deoxy-2'-fluorouridine-3'-phosphate
  modified_base 12: mod_base = OTHER; note = 2'-O-methyluridine-3'-phosphate
  modified_base 13: mod_base = OTHER; note = 2'-O-methyluridine-3'-phosphate
  modified_base 14: mod_base = OTHER; note = 2'-O-methyluridine-3'-phosphate
  modified_base 15: mod_base = OTHER; note = 2'-O-methylcytidine-3'-phosphate
  modified_base 16: mod_base = OTHER; note = 2'-O-methyladenosine-3'-phosphate
  modified_base 17: mod_base = OTHER; note = 2'-O-methyladenosine-3'-phosphate
  modified_base 18: mod_base = OTHER; note = 2'-O-methyladenosine-3'-phosphate
  modified_base 19: mod_base = OTHER; note = 2'-O-methylcytidine-3'-phosphate
  modified_base 20: mod_base = OTHER; note = 2'-O-methylguanosine-3'-phosphate
  modified_base 21: mod_base = OTHER; note = 2'-O-methyluridine-3'-phosphate ((2S,4R)-1-[29-[[2-(acetylamino)-2-deoxy-beta-D-galactopyra nosyl]oxy]-14,14-bis[[3-[[3-[[5-[[2-(acetylamino)-2-deoxy-b eta-D-galactopyranosyl]oxy]-1-oxopentyl]amino]propyl]amino] -3-oxopropoxy]methyl]-1,12,19,25-tetraoxo-16-oxa-13,20,24-t riazanonacos-1-yl]-4-hydroxy-2-pyrrolidinyl)methyl ester
ttcaaagtaattttcaaacgt

SEQ ID NO: 390 - RNA, 21 nt, synthetic construct
  source 1..21: mol_type = other RNA
  modified_base 1: mod_base = OTHER; note = 2'-O-methyluridine-3'-phosphorothioate
  modified_base 2: mod_base = OTHER; note = 2'-O-methyluridine-3'-phosphorothioate
  modified_base 3: mod_base = OTHER; note = 2'-O-methylguanosine-3'-phosphate
  modified_base 4: mod_base = OTHER; note = 2'-O-methyluridine-3'-phosphate
  modified_base 5: mod_base = OTHER; note = 2'-O-methyladenosine-3'-phosphate
  modified_base 6: mod_base = OTHER; note = 2'-O-methyluridine-3'-phosphate
  modified_base 7: mod_base = OTHER; note = 2'-deoxy-2'-fluoroguanosine-3'-phosphate
  modified_base 8: mod_base = OTHER; note = 2'-O-methylguanosine-3'-phosphate
  modified_base 9: mod_base = OTHER; note = 2'-deoxy-2'-fluorouridine-3'-phosphate
  modified_base 10: mod_base = OTHER; note = 2'-deoxy-2'-fluorouridine-3'-phosphate
  modified_base 11: mod_base = OTHER; note = 2'-deoxy-2'-fluoroadenosine-3'-phosphate
  modified_base 12: mod_base = OTHER; note = 2'-O-methyladenosine-3'-phosphate
  modified_base 13: mod_base = OTHER; note = 2'-O-methylcytidine-3'-phosphate
  modified_base 14: mod_base = OTHER; note = 2'-O-methyladenosine-3'-phosphate
  modified_base 15: mod_base = OTHER; note = 2'-O-methyluridine-3'-phosphate
  modified_base 16: mod_base = OTHER; note = 2'-O-methyladenosine-3'-phosphate
  modified_base 17: mod_base = OTHER; note = 2'-O-methyluridine-3'-phosphate
  modified_base 18: mod_base = OTHER; note = 2'-O-methyluridine-3'-phosphate
  modified_base 19: mod_base = OTHER; note = 2'-O-methylcytidine-3'-phosphate
  modified_base 20: mod_base = OTHER; note = 2'-O-methyluridine-3'-phosphate
  modified_base 21: mod_base = OTHER; note = 2'-O-methyluridine-3'-phosphate ((2S,4R)-1-[29-[[2-(acetylamino)-2-deoxy-beta-D-galactopyra nosyl]oxy]-14,14-bis[[3-[[3-[[5-[[2-(acetylamino)-2-deoxy-b eta-D-galactopyranosyl]oxy]-1-oxopentyl]amino]propyl]amino] -3-oxopropoxy]methyl]-1,12,19,25-tetraoxo-16-oxa-13,20,24-t riazanonacos-1-yl]-4-hydroxy-2-pyrrolidinyl)methyl ester
ttgtatggttaacatattctt

SEQ ID NO: 391 - RNA, 21 nt, synthetic construct
  source 1..21: mol_type = other RNA
  modified_base 1: mod_base = OTHER; note = 2'-O-methyluridine-3'-phosphorothioate
  modified_base 2: mod_base = OTHER; note = 2'-O-methylguanosine-3'-phosphorothioate
  modified_base 3: mod_base = OTHER; note = 2'-O-methylcytidine-3'-phosphate
  modified_base 4: mod_base = OTHER; note = 2'-O-methylcytidine-3'-phosphate
  modified_base 5: mod_base = OTHER; note = 2'-O-methyladenosine-3'-phosphate
  modified_base 6: mod_base = OTHER; note = 2'-O-methylguanosine-3'-phosphate
  modified_base 7: mod_base = OTHER; note = 2'-deoxy-2'-fluoroguanosine-3'-phosphate
  modified_base 8: mod_base = OTHER; note = 2'-O-methyluridine-3'-phosphate
  modified_base 9: mod_base = OTHER; note = 2'-deoxy-2'-fluorocytidine-3'-phosphate
  modified_base 10: mod_base = OTHER; note = 2'-deoxy-2'-fluorocytidine-3'-phosphate
  modified_base 11: mod_base = OTHER; note = 2'-deoxy-2'-fluoroadenosine-3'-phosphate
  modified_base 12: mod_base = OTHER; note = 2'-O-methyluridine-3'-phosphate
  modified_base 13: mod_base = OTHER; note = 2'-O-methylguanosine-3'-phosphate
  modified_base 14: mod_base = OTHER; note = 2'-O-methyladenosine-3'-phosphate
  modified_base 15: mod_base = OTHER; note = 2'-O-methylcytidine-3'-phosphate
  modified_base 16: mod_base = OTHER; note = 2'-O-methylcytidine-3'-phosphate
  modified_base 17: mod_base = OTHER; note = 2'-O-methyladenosine-3'-phosphate
  modified_base 18: mod_base = OTHER; note = 2'-O-methylcytidine-3'-phosphate
  modified_base 19: mod_base = OTHER; note = 2'-O-methyladenosine-3'-phosphate
  modified_base 20: mod_base = OTHER; note = 2'-O-methylcytidine-3'-phosphate
  modified_base 21: mod_base = OTHER; note = 2'-O-methyluridine-3'-phosphate ((2S,4R)-1-[29-[[2-(acetylamino)-2-deoxy-beta-D-galactopyra nosyl]oxy]-14,14-bis[[3-[[3-[[5-[[2-(acetylamino)-2-deoxy-b eta-D-galactopyranosyl]oxy]-1-oxopentyl]amino]propyl]amino] -3-oxopropoxy]methyl]-1,12,19,25-tetraoxo-16-oxa-13,20,24-t riazanonacos-1-yl]-4-hydroxy-2-pyrrolidinyl)methyl ester
tgccaggtccatgaccacact

SEQ ID NO: 392 - RNA, 21 nt, synthetic construct
  source 1..21: mol_type = other RNA
  modified_base 1: mod_base = OTHER; note = 2'-O-methyladenosine-3'-phosphorothioate
  modified_base 2: mod_base = OTHER; note = 2'-O-methylcytidine-3'-phosphorothioate
  modified_base 3: mod_base = OTHER; note = 2'-O-methylcytidine-3'-phosphate
  modified_base 4: mod_base = OTHER; note = 2'-O-methyladenosine-3'-phosphate
  modified_base 5: mod_base = OTHER; note = 2'-O-methylcytidine-3'-phosphate
  modified_base 6: mod_base = OTHER; note = 2'-O-methyladenosine-3'-phosphate
  modified_base 7: mod_base = OTHER; note = 2'-deoxy-2'-fluorocytidine-3'-phosphate
  modified_base 8: mod_base = OTHER; note = 2'-O-methylguanosine-3'-phosphate
  modified_base 9: mod_base = OTHER; note = 2'-deoxy-2'-fluorouridine-3'-phosphate
  modified_base 10: mod_base = OTHER; note = 2'-deoxy-2'-fluorocytidine-3'-phosphate
  modified_base 11: mod_base = OTHER; note = 2'-deoxy-2'-fluorouridine-3'-phosphate
  modified_base 12: mod_base = OTHER; note = 2'-O-methylguanosine-3'-phosphate
  modified_base 13: mod_base = OTHER; note = 2'-O-methyluridine-3'-phosphate
  modified_base 14: mod_base = OTHER; note = 2'-O-methyladenosine-3'-phosphate
  modified_base 15: mod_base = OTHER; note = 2'-O-methylcytidine-3'-phosphate
  modified_base 16: mod_base = OTHER; note = 2'-O-methylcytidine-3'-phosphate
  modified_base 17: mod_base = OTHER; note = 2'-O-methyladenosine-3'-phosphate
  modified_base 18: mod_base = OTHER; note = 2'-O-methyluridine-3'-phosphate
  modified_base 19: mod_base = OTHER; note = 2'-O-methylguanosine-3'-phosphate
  modified_base 20: mod_base = OTHER; note = 2'-O-methylcytidine-3'-phosphate
  modified_base 21: mod_base = OTHER; note = 2'-O-methyluridine-3'-phosphate ((2S,4R)-1-[29-[[2-(acetylamino)-2-deoxy-beta-D-galactopyra nosyl]oxy]-14,14-bis[[3-[[3-[[5-[[2-(acetylamino)-2-deoxy-b eta-D-galactopyranosyl]oxy]-1-oxopentyl]amino]propyl]amino] -3-oxopropoxy]methyl]-1,12,19,25-tetraoxo-16-oxa-13,20,24-t riazanonacos-1-yl]-4-hydroxy-2-pyrrolidinyl)methyl ester
accacacgtctgtaccatgct

SEQ ID NO: 393 - RNA, 21 nt, synthetic construct
  source 1..21: mol_type = other RNA
  modified_base 1: mod_base = OTHER; note = 2'-O-methylcytidine-3'-phosphorothioate
  modified_base 2: mod_base = OTHER; note = 2'-O-methylcytidine-3'-phosphorothioate
  modified_base 3: mod_base = OTHER; note = 2'-O-methyladenosine-3'-phosphate
  modified_base 4: mod_base = OTHER; note = 2'-O-methyluridine-3'-phosphate
  modified_base 5: mod_base = OTHER; note = 2'-O-methylguanosine-3'-phosphate
  modified_base 6: mod_base = OTHER; note = 2'-O-methylcytidine-3'-phosphate
  modified_base 7: mod_base = OTHER; note = 2'-deoxy-2'-fluoroadenosine-3'-phosphate
  modified_base 8: mod_base = OTHER; note = 2'-O-methyladenosine-3'-phosphate
  modified_base 9: mod_base = OTHER; note = 2'-deoxy-2'-fluorouridine-3'-phosphate
  modified_base 10: mod_base = OTHER; note = 2'-deoxy-2'-fluorouridine-3'-phosphate
  modified_base 11: mod_base = OTHER; note = 2'-deoxy-2'-fluorouridine-3'-phosphate
  modified_base 12: mod_base = OTHER; note = 2'-O-methyladenosine-3'-phosphate
  modified_base 13: mod_base = OTHER; note = 2'-O-methyladenosine-3'-phosphate
  modified_base 14: mod_base = OTHER; note = 2'-O-methylcytidine-3'-phosphate
  modified_base 15: mod_base = OTHER; note = 2'-O-methyluridine-3'-phosphate
  modified_base 16: mod_base = OTHER; note = 2'-O-methylcytidine-3'-phosphate
  modified_base 17: mod_base = OTHER; note = 2'-O-methyluridine-3'-phosphate
  modified_base 18: mod_base = OTHER; note = 2'-O-methyluridine-3'-phosphate
  modified_base 19: mod_base = OTHER; note = 2'-O-methyladenosine-3'-phosphate
  modified_base 20: mod_base = OTHER; note = 2'-O-methyluridine-3'-phosphate
  modified_base 21: mod_base = OTHER; note = 2'-O-methyluridine-3'-phosphate ((2S,4R)-1-[29-[[2-(acetylamino)-2-deoxy-beta-D-galactopyra nosyl]oxy]-14,14-bis[[3-[[3-[[5-[[2-(acetylamino)-2-deoxy-b eta-D-galactopyranosyl]oxy]-1-oxopentyl]amino]propyl]amino] -3-oxopropoxy]methyl]-1,12,19,25-tetraoxo-16-oxa-13,20,24-t riazanonacos-1-yl]-4-hydroxy-2-pyrrolidinyl)methyl ester
ccatgcaatttaactcttatt

SEQ ID NO: 394 - RNA, 21 nt, synthetic construct
  source 1..21: mol_type = other RNA
  modified_base 1: mod_base = OTHER; note = 2'-O-methyluridine-3'-phosphorothioate
  modified_base 2: mod_base = OTHER; note = 2'-O-methyluridine-3'-phosphorothioate
  modified_base 3: mod_base = OTHER; note = 2'-O-methylguanosine-3'-phosphate
  modified_base 4: mod_base = OTHER; note = 2'-O-methylguanosine-3'-phosphate
  modified_base 5: mod_base = OTHER; note = 2'-O-methyluridine-3'-phosphate
  modified_base 6: mod_base = OTHER; note = 2'-O-methyluridine-3'-phosphate
  modified_base 7: mod_base = OTHER; note = 2'-deoxy-2'-fluoroadenosine-3'-phosphate
  modified_base 8: mod_base = OTHER; note = 2'-O-methyluridine-3'-phosphate
  modified_base 9: mod_base = OTHER; note = 2'-deoxy-2'-fluorouridine-3'-phosphate
  modified_base 10: mod_base = OTHER; note = 2'-deoxy-2'-fluorouridine-3'-phosphate
  modified_base 11: mod_base = OTHER; note = 2'-deoxy-2'-fluoroguanosine-3'-phosphate
  modified_base 12: mod_base = OTHER; note = 2'-O-methylcytidine-3'-phosphate
  modified_base 13: mod_base = OTHER; note = 2'-O-methyluridine-3'-phosphate
  modified_base 14: mod_base = OTHER; note = 2'-O-methyluridine-3'-phosphate
  modified_base 15: mod_base = OTHER; note = 2'-O-methyladenosine-3'-phosphate
  modified_base 16: mod_base = OTHER; note = 2'-O-methylguanosine-3'-phosphate
  modified_base 17: mod_base = OTHER; note = 2'-O-methylguanosine-3'-phosphate
  modified_base 18: mod_base = OTHER; note = 2'-O-methyluridine-3'-phosphate
  modified_base 19: mod_base = OTHER; note = 2'-O-methylguanosine-3'-phosphate
  modified_base 20: mod_base = OTHER; note = 2'-O-methyluridine-3'-phosphate
  modified_base 21: mod_base = OTHER; note = 2'-O-methyluridine-3'-phosphate ((2S,4R)-1-[29-[[2-(acetylamino)-2-deoxy-beta-D-galactopyra nosyl]oxy]-14,14-bis[[3-[[3-[[5-[[2-(acetylamino)-2-deoxy-b eta-D-galactopyranosyl]oxy]-1-oxopentyl]amino]propyl]amino] -3-oxopropoxy]methyl]-1,12,19,25-tetraoxo-16-oxa-13,20,24-t riazanonacos-1-yl]-4-hydroxy-2-pyrrolidinyl)methyl ester
ttggttatttgcttaggtgtt

SEQ ID NO: 395 - RNA, 21 nt, synthetic construct
  source 1..21: mol_type = other RNA
  modified_base 1: mod_base = OTHER; note = 2'-O-methylcytidine-3'-phosphorothioate
  modified_base 2: mod_base = OTHER; note = 2'-O-methyladenosine-3'-phosphorothioate
  modified_base 3: mod_base = OTHER; note = 2'-O-methyluridine-3'-phosphate
  modified_base 4: mod_base = OTHER; note = 2'-O-methyladenosine-3'-phosphate
  modified_base 5: mod_base = OTHER; note = 2'-O-methylcytidine-3'-phosphate
  modified_base 6: mod_base = OTHER; note = 2'-O-methyladenosine-3'-phosphate
  modified_base 7: mod_base = OTHER; note = 2'-deoxy-2'-fluorouridine-3'-phosphate
  modified_base 8: mod_base = OTHER; note = 2'-O-methyluridine-3'-phosphate
  modified_base 9: mod_base = OTHER; note = 2'-deoxy-2'-fluorocytidine-3'-phosphate
  modified_base 10: mod_base = OTHER; note = 2'-deoxy-2'-fluoroadenosine-3'-phosphate
  modified_base 11: mod_base = OTHER; note = 2'-deoxy-2'-fluorouridine-3'-phosphate
  modified_base 12: mod_base = OTHER; note = 2'-O-methyluridine-3'-phosphate
  modified_base 13: mod_base = OTHER; note = 2'-O-methylcytidine-3'-phosphate
  modified_base 14: mod_base = OTHER; note = 2'-O-methyladenosine-3'-phosphate
  modified_base 15: mod_base = OTHER; note = 2'-O-methylguanosine-3'-phosphate
  modified_base 16: mod_base = OTHER; note = 2'-O-methylcytidine-3'-phosphate
  modified_base 17: mod_base = OTHER; note = 2'-O-methyladenosine-3'-phosphate
  modified_base 18: mod_base = OTHER; note = 2'-O-methyladenosine-3'-phosphate
  modified_base 19: mod_base = OTHER; note = 2'-O-methyladenosine-3'-phosphate
  modified_base 20: mod_base = OTHER; note = 2'-O-methyluridine-3'-phosphate
  modified_base 21: mod_base = OTHER; note = 2'-O-methyluridine-3'-phosphate ((2S,4R)-1-[29-[[2-(acetylamino)-2-deoxy-beta-D-galactopyra nosyl]oxy]-14,14-bis[[3-[[3-[[5-[[2-(acetylamino)-2-deoxy-b eta-D-galactopyranosyl]oxy]-1-oxopentyl]amino]propyl]amino] -3-oxopropoxy]methyl]-1,12,19,25-tetraoxo-16-oxa-13,20,24-t riazanonacos-1-yl]-4-hydroxy-2-pyrrolidinyl)methyl ester
catacattcattcagcaaatt

SEQ ID NO: 396 - RNA, 21 nt, synthetic construct
  source 1..21: mol_type = other RNA
  modified_base 1: mod_base = OTHER; note = 2'-O-methylcytidine-3'-phosphorothioate
  modified_base 2: mod_base = OTHER; note = 2'-O-methyladenosine-3'-phosphorothioate
  modified_base 3: mod_base = OTHER; note = 2'-O-methylguanosine-3'-phosphate
  modified_base 4: mod_base = OTHER; note = 2'-O-methylcytidine-3'-phosphate
  modified_base 5: mod_base = OTHER; note = 2'-O-methylcytidine-3'-phosphate
  modified_base 6: mod_base = OTHER; note = 2'-O-methyladenosine-3'-phosphate
  modified_base 7: mod_base = OTHER; note = 2'-deoxy-2'-fluorocytidine-3'-phosphate
  modified_base 8: mod_base = OTHER; note = 2'-O-methylguanosine-3'-phosphate
  modified_base 9: mod_base = OTHER; note = 2'-deoxy-2'-fluorouridine-3'-phosphate
  modified_base 10: mod_base = OTHER; note = 2'-deoxy-2'-fluoroguanosine-3'-phosphate
  modified_base 11: mod_base = OTHER; note = 2'-deoxy-2'-fluorocytidine-3'-phosphate
  modified_base 12: mod_base = OTHER; note = 2'-O-methyladenosine-3'-phosphate
  modified_base 13: mod_base = OTHER; note = 2'-O-methylcytidine-3'-phosphate
  modified_base 14: mod_base = OTHER; note = 2'-O-methyladenosine-3'-phosphate
  modified_base 15: mod_base = OTHER; note = 2'-O-methylguanosine-3'-phosphate
  modified_base 16: mod_base = OTHER; note = 2'-O-methylcytidine-3'-phosphate
  modified_base 17: mod_base = OTHER; note = 2'-O-methyladenosine-3'-phosphate
  modified_base 18: mod_base = OTHER; note = 2'-O-methylguanosine-3'-phosphate
  modified_base 19: mod_base = OTHER; note = 2'-O-methyluridine-3'-phosphate
  modified_base 20: mod_base = OTHER; note = 2'-O-methyluridine-3'-phosphate
  modified_base 21: mod_base = OTHER; note = 2'-O-methyluridine-3'-phosphate ((2S,4R)-1-[29-[[2-(acetylamino)-2-deoxy-beta-D-galactopyra nosyl]oxy]-14,14-bis[[3-[[3-[[5-[[2-(acetylamino)-2-deoxy-b eta-D-galactopyranosyl]oxy]-1-oxopentyl]amino]propyl]amino] -3-oxopropoxy]methyl]-1,12,19,25-tetraoxo-16-oxa-13,20,24-t riazanonacos-1-yl]-4-hydroxy-2-pyrrolidinyl)methyl ester
cagccacgtgcacagcagttt

SEQ ID NO: 397 - RNA, 21 nt, synthetic construct
  source 1..21: mol_type = other RNA
  modified_base 1: mod_base = OTHER; note = 2'-O-methylcytidine-3'-phosphorothioate
  modified_base 2: mod_base = OTHER; note = 2'-O-methyladenosine-3'-phosphorothioate
  modified_base 3: mod_base = OTHER; note = 2'-O-methylguanosine-3'-phosphate
  modified_base 4: mod_base = OTHER; note = 2'-O-methyluridine-3'-phosphate
  modified_base 5: mod_base = OTHER; note = 2'-O-methyluridine-3'-phosphate
  modified_base 6: mod_base = OTHER; note = 2'-O-methylguanosine-3'-phosphate
  modified_base 7: mod_base = OTHER; note = 2'-deoxy-2'-fluorocytidine-3'-phosphate
  modified_base 8: mod_base = OTHER; note = 2'-O-methyluridine-3'-phosphate
  modified_base 9: mod_base = OTHER; note = 2'-deoxy-2'-fluorouridine-3'-phosphate
  modified_base 10: mod_base = OTHER; note = 2'-deoxy-2'-fluorouridine-3'-phosphate
  modified_base 11: mod_base = OTHER; note = 2'-deoxy-2'-fluorouridine-3'-phosphate
  modified_base 12: mod_base = OTHER; note = 2'-O-methyladenosine-3'-phosphate
  modified_base 13: mod_base = OTHER; note = 2'-O-methylcytidine-3'-phosphate
  modified_base 14: mod_base = OTHER; note = 2'-O-methyluridine-3'-phosphate
  modified_base 15: mod_base = OTHER; note = 2'-O-methyladenosine-3'-phosphate
  modified_base 16: mod_base = OTHER; note = 2'-O-methylguanosine-3'-phosphate
  modified_base 17: mod_base = OTHER; note = 2'-O-methyluridine-3'-phosphate
  modified_base 18: mod_base = OTHER; note = 2'-O-methylcytidine-3'-phosphate
  modified_base 19: mod_base = OTHER; note = 2'-O-methyluridine-3'-phosphate
  modified_base 20: mod_base = OTHER; note = 2'-O-methyluridine-3'-phosphate
  modified_base 21: mod_base = OTHER; note = 2'-O-methyluridine-3'-phosphate ((2S,4R)-1-[29-[[2-(acetylamino)-2-deoxy-beta-D-galactopyra nosyl]oxy]-14,14-bis[[3-[[3-[[5-[[2-(acetylamino)-2-deoxy-b eta-D-galactopyranosyl]oxy]-1-oxopentyl]amino]propyl]amino] -3-oxopropoxy]methyl]-1,12,19,25-tetraoxo-16-oxa-13,20,24-t riazanonacos-1-yl]-4-hydroxy-2-pyrrolidinyl)methyl ester
cagttgcttttactagtcttt

SEQ ID NO: 398 - RNA, 21 nt, synthetic construct
  source 1..21: mol_type = other RNA
  modified_base 1: mod_base = OTHER; note = 2'-O-methylcytidine-3'-phosphorothioate
  modified_base 2: mod_base = OTHER; note = 2'-O-methyluridine-3'-phosphorothioate
  modified_base 3: mod_base = OTHER; note = 2'-O-methyladenosine-3'-phosphate
  modified_base 4: mod_base = OTHER; note = 2'-O-methylguanosine-3'-phosphate
  modified_base 5: mod_base = OTHER; note = 2'-O-methyluridine-3'-phosphate
  modified_base 6: mod_base = OTHER; note = 2'-O-methylcytidine-3'-phosphate
  modified_base 7: mod_base = OTHER; note = 2'-deoxy-2'-fluorouridine-3'-phosphate
  modified_base 8: mod_base = OTHER; note = 2'-O-methyluridine-3'-phosphate
  modified_base 9: mod_base = OTHER; note = 2'-deoxy-2'-fluoroadenosine-3'-phosphate
  modified_base 10: mod_base = OTHER; note = 2'-deoxy-2'-fluoroguanosine-3'-phosphate
  modified_base 11: mod_base = OTHER; note = 2'-deoxy-2'-fluorocytidine-3'-phosphate
  modified_base 12: mod_base = OTHER; note = 2'-O-methyluridine-3'-phosphate
  modified_base 13: mod_base = OTHER; note = 2'-O-methylcytidine-3'-phosphate
  modified_base 14: mod_base = OTHER; note = 2'-O-methyluridine-3'-phosphate
  modified_base 15: mod_base = OTHER; note = 2'-O-methyladenosine-3'-phosphate
  modified_base 16: mod_base = OTHER; note = 2'-O-methylcytidine-3'-phosphate
  modified_base 17: mod_base = OTHER; note = 2'-O-methylguanosine-3'-phosphate
  modified_base 18: mod_base = OTHER; note = 2'-O-methyladenosine-3'-phosphate
  modified_base 19: mod_base = OTHER; note = 2'-O-methyluridine-3'-phosphate
  modified_base 20: mod_base = OTHER; note = 2'-O-methyluridine-3'-phosphate
  modified_base 21: mod_base = OTHER; note = 2'-O-methyluridine-3'-phosphate ((2S,4R)-1-[29-[[2-(acetylamino)-2-deoxy-beta-D-galactopyra nosyl]oxy]-14,14-bis[[3-[[3-[[5-[[2-(acetylamino)-2-deoxy-b eta-D-galactopyranosyl]oxy]-1-oxopentyl]amino]propyl]amino] -3-oxopropoxy]methyl]-1,12,19,25-tetraoxo-16-oxa-13,20,24-t riazanonacos-1-yl]-4-hydroxy-2-pyrrolidinyl)methyl ester
ctagtcttagctctacgattt

SEQ ID NO: 399 - RNA, 21 nt, synthetic construct
  source 1..21: mol_type = other RNA
  modified_base 1: mod_base = OTHER; note = 2'-O-methyladenosine-3'-phosphorothioate
  modified_base 2: mod_base = OTHER; note = 2'-O-methylcytidine-3'-phosphorothioate
  modified_base 3: mod_base = OTHER; note = 2'-O-methylguanosine-3'-phosphate
  modified_base 4: mod_base = OTHER; note = 2'-O-methyladenosine-3'-phosphate
  modified_base 5: mod_base = OTHER; note = 2'-O-methyluridine-3'-phosphate
  modified_base 6: mod_base = OTHER; note = 2'-O-methyluridine-3'-phosphate
  modified_base 7: mod_base = OTHER; note = 2'-deoxy-2'-fluorouridine-3'-phosphate
  modified_base 8: mod_base = OTHER; note = 2'-O-methyladenosine-3'-phosphate
  modified_base 9: mod_base = OTHER; note = 2'-deoxy-2'-fluoroadenosine-3'-phosphate
  modified_base 10: mod_base = OTHER; note = 2'-deoxy-2'-fluoroadenosine-3'-phosphate
  modified_base 11: mod_base = OTHER; note = 2'-deoxy-2'-fluorouridine-3'-phosphate
  modified_base 12: mod_base = OTHER; note = 2'-O-methylcytidine-3'-phosphate
  modified_base 13: mod_base = OTHER; note = 2'-O-methylcytidine-3'-phosphate
  modified_base 14: mod_base = OTHER; note = 2'-O-methyladenosine-3'-phosphate
  modified_base 15: mod_base = OTHER; note = 2'-O-methyluridine-3'-phosphate
  modified_base 16: mod_base = OTHER; note = 2'-O-methylguanosine-3'-phosphate
  modified_base 17: mod_base = OTHER; note = 2'-O-methyluridine-3'-phosphate
  modified_base 18: mod_base = OTHER; note = 2'-O-methylguanosine-3'-phosphate
  modified_base 19: mod_base = OTHER; note = 2'-O-methyluridine-3'-phosphate
  modified_base 20: mod_base = OTHER; note = 2'-O-methylcytidine-3'-phosphate
  modified_base 21: mod_base = OTHER; note = 2'-O-methyluridine-3'-phosphate ((2S,4R)-1-[29-[[2-(acetylamino)-2-deoxy-beta-D-galactopyra nosyl]oxy]-14,14-bis[[3-[[3-[[5-[[2-(acetylamino)-2-deoxy-b eta-D-galactopyranosyl]oxy]-1-oxopentyl]amino]propyl]amino] -3-oxopropoxy]methyl]-1,12,19,25-tetraoxo-16-oxa-13,20,24-t riazanonacos-1-yl]-4-hydroxy-2-pyrrolidinyl)methyl ester
acgatttaaatccatgtgtct

SEQ ID NO: 400 - RNA, 21 nt, synthetic construct
  source 1..21: mol_type = other RNA
  modified_base 1: mod_base = OTHER; note = 2'-O-methyladenosine-3'-phosphorothioate
  modified_base 2: mod_base = OTHER; note = 2'-O-methylcytidine-3'-phosphorothioate
  modified_base 3: mod_base = OTHER; note = 2'-O-methyluridine-3'-phosphate
  modified_base 4: mod_base = OTHER; note = 2'-O-methyladenosine-3'-phosphate
  modified_base 5: mod_base = OTHER; note = 2'-O-methylcytidine-3'-phosphate
  modified_base 6: mod_base = OTHER; note = 2'-O-methyluridine-3'-phosphate
  modified_base 7: mod_base = OTHER; note = 2'-deoxy-2'-fluoroadenosine-3'-phosphate
  modified_base 8: mod_base = OTHER; note = 2'-O-methylguanosine-3'-phosphate
  modified_base 9: mod_base = OTHER; note = 2'-deoxy-2'-fluorouridine-3'-phosphate
  modified_base 10: mod_base = OTHER; note = 2'-deoxy-2'-fluorouridine-3'-phosphate
  modified_base 11: mod_base = OTHER; note = 2'-deoxy-2'-fluorouridine-3'-phosphate
  modified_base 12: mod_base = OTHER; note = 2'-O-methyladenosine-3'-phosphate
  modified_base 13: mod_base = OTHER; note = 2'-O-methylcytidine-3'-phosphate
  modified_base 14: mod_base = OTHER; note = 2'-O-methylcytidine-3'-phosphate
  modified_base 15: mod_base = OTHER; note = 2'-O-methyladenosine-3'-phosphate
  modified_base 16: mod_base = OTHER; note = 2'-O-methylguanosine-3'-phosphate
  modified_base 17: mod_base = OTHER; note = 2'-O-methyladenosine-3'-phosphate
  modified_base 18: mod_base = OTHER; note = 2'-O-methylguanosine-3'-phosphate
  modified_base 19: mod_base = OTHER; note = 2'-O-methylguanosine-3'-phosphate
  modified_base 20: mod_base = OTHER; note = 2'-O-methyladenosine-3'-phosphate
  modified_base 21: mod_base = OTHER; note = 2'-O-methyluridine-3'-phosphate ((2S,4R)-1-[29-[[2-(acetylamino)-2-deoxy-beta-D-galactopyra nosyl]oxy]-14,14-bis[[3-[[3-[[5-[[2-(acetylamino)-2-deoxy-b eta-D-galactopyranosyl]oxy]-1-oxopentyl]amino]propyl]amino] -3-oxopropoxy]methyl]-1,12,19,25-tetraoxo-16-oxa-13,20,24-t riazanonacos-1-yl]-4-hydroxy-2-pyrrolidinyl)methyl ester
actactagtttaccagaggat

SEQ ID NO: 401 - RNA, 21 nt, synthetic construct
  source 1..21: mol_type = other RNA
  modified_base 1: mod_base = OTHER; note = 2'-O-methyladenosine-3'-phosphorothioate
  modified_base 2: mod_base = OTHER; note = 2'-O-methyladenosine-3'-phosphorothioate
  modified_base 3: mod_base = OTHER; note = 2'-O-methylguanosine-3'-phosphate
  modified_base 4: mod_base = OTHER; note = 2'-O-methylguanosine-3'-phosphate
  modified_base 5: mod_base = OTHER; note = 2'-O-methylguanosine-3'-phosphate
  modified_base 6: mod_base = OTHER; note = 2'-O-methyladenosine-3'-phosphate
  modified_base 7: mod_base = OTHER; note = 2'-deoxy-2'-fluoroguanosine-3'-phosphate
  modified_base 8: mod_base = OTHER; note = 2'-O-methyladenosine-3'-phosphate
  modified_base 9: mod_base = OTHER; note = 2'-deoxy-2'-fluorouridine-3'-phosphate
  modified_base 10: mod_base = OTHER; note = 2'-deoxy-2'-fluoroadenosine-3'-phosphate
  modified_base 11: mod_base = OTHER; note = 2'-deoxy-2'-fluoroadenosine-3'-phosphate
  modified_base 12: mod_base = OTHER; note = 2'-O-methyladenosine-3'-phosphate
  modified_base 13: mod_base = OTHER; note = 2'-O-methylguanosine-3'-phosphate
  modified_base 14: mod_base = OTHER; note = 2'-O-methyladenosine-3'-phosphate
  modified_base 15: mod_base = OTHER; note = 2'-O-methylguanosine-3'-phosphate
  modified_base 16: mod_base = OTHER; note = 2'-O-methylguanosine-3'-phosphate
  modified_base 17: mod_base = OTHER; note = 2'-O-methyladenosine-3'-phosphate
  modified_base 18: mod_base = OTHER; note = 2'-O-methylguanosine-3'-phosphate
  modified_base 19: mod_base = OTHER; note = 2'-O-methyluridine-3'-phosphate
  modified_base 20: mod_base = OTHER; note = 2'-O-methyluridine-3'-phosphate
  modified_base 21: mod_base = OTHER; note = 2'-O-methyluridine-3'-phosphate ((2S,4R)-1-[29-[[2-(acetylamino)-2-deoxy-beta-D-galactopyra nosyl]oxy]-14,14-bis[[3-[[3-[[5-[[2-(acetylamino)-2-deoxy-b eta-D-galactopyranosyl]oxy]-1-oxopentyl]amino]propyl]amino] -3-oxopropoxy]methyl]-1,12,19,25-tetraoxo-16-oxa-13,20,24-t riazanonacos-1-yl]-4-hydroxy-2-pyrrolidinyl)methyl ester
aagggagataaagaggagttt

SEQ ID NO: 402 - RNA, 21 nt, synthetic construct
  source 1..21: mol_type = other RNA
  modified_base 1: mod_base = OTHER; note = 2'-O-methylguanosine-3'-phosphorothioate
  modified_base 2: mod_base = OTHER; note = 2'-O-methyladenosine-3'-phosphorothioate
  modified_base 3: mod_base = OTHER; note = 2'-O-methylguanosine-3'-phosphate
  modified_base 4: mod_base = OTHER; note = 2'-O-methyluridine-3'-phosphate
  modified_base 5: mod_base = OTHER; note = 2'-O-methyluridine-3'-phosphate
  modified_base 6: mod_base = OTHER; note = 2'-O-methylguanosine-3'-phosphate
  modified_base 7: mod_base = OTHER; note = 2'-deoxy-2'-fluoroguanosine-3'-phosphate
  modified_base 8: mod_base = OTHER; note = 2'-O-methyluridine-3'-phosphate
  modified_base 9: mod_base = OTHER; note = 2'-deoxy-2'-fluorouridine-3'-phosphate
  modified_base 10: mod_base = OTHER; note = 2'-deoxy-2'-fluoroadenosine-3'-phosphate
  modified_base 11: mod_base = OTHER; note = 2'-deoxy-2'-fluoroadenosine-3'-phosphate
  modified_base 12: mod_base = OTHER; note = 2'-O-methyluridine-3'-phosphate
  modified_base 13: mod_base = OTHER; note = 2'-O-methylguanosine-3'-phosphate
  modified_base 14: mod_base = OTHER; note = 2'-O-methylguanosine-3'-phosphate
  modified_base 15: mod_base = OTHER; note = 2'-O-methylguanosine-3'-phosphate
  modified_base 16: mod_base = OTHER; note = 2'-O-methyluridine-3'-phosphate
  modified_base 17: mod_base = OTHER; note = 2'-O-methyladenosine-3'-phosphate
  modified_base 18: mod_base = OTHER; note = 2'-O-methylcytidine-3'-phosphate
  modified_base 19: mod_base = OTHER; note = 2'-O-methyladenosine-3'-phosphate
  modified_base 20: mod_base = OTHER; note = 2'-O-methyladenosine-3'-phosphate
  modified_base 21: mod_base = OTHER; note = 2'-O-methyluridine-3'-phosphate ((2S,4R)-1-[29-[[2-(acetylamino)-2-deoxy-beta-D-galactopyra nosyl]oxy]-14,14-bis[[3-[[3-[[5-[[2-(acetylamino)-2-deoxy-b eta-D-galactopyranosyl]oxy]-1-oxopentyl]amino]propyl]amino] -3-oxopropoxy]methyl]-1,12,19,25-tetraoxo-16-oxa-13,20,24-t riazanonacos-1-yl]-4-hydroxy-2-pyrrolidinyl)methyl ester
gagttggttaatgggtacaat

SEQ ID NO: 403 - RNA, 21 nt, synthetic construct
  source 1..21: mol_type = other RNA
  modified_base 1: mod_base = OTHER; note = 2'-O-methyladenosine-3'-phosphorothioate
  modified_base 2: mod_base = OTHER; note = 2'-O-methyluridine-3'-phosphorothioate
  modified_base 3: mod_base = OTHER; note = 2'-O-methylcytidine-3'-phosphate
  modified_base 4: mod_base = OTHER; note = 2'-O-methylcytidine-3'-phosphate
  modified_base 5: mod_base = OTHER; note = 2'-O-methyladenosine-3'-phosphate
  modified_base 6: mod_base = OTHER; note = 2'-O-methylguanosine-3'-phosphate
  modified_base 7: mod_base = OTHER; note = 2'-deoxy-2'-fluorouridine-3'-phosphate
  modified_base 8: mod_base = OTHER; note = 2'-O-methyluridine-3'-phosphate
  modified_base 9: mod_base = OTHER; note = 2'-deoxy-2'-fluoroadenosine-3'-phosphate
  modified_base 10: mod_base = OTHER; note = 2'-deoxy-2'-fluoroguanosine-3'-phosphate
  modified_base 11: mod_base = OTHER; note = 2'-deoxy-2'-fluoroadenosine-3'-phosphate
  modified_base 12: mod_base = OTHER; note = 2'-O-methyluridine-3'-phosphate
  modified_base 13: mod_base = OTHER; note = 2'-O-methylguanosine-3'-phosphate
  modified_base 14: mod_base = OTHER; note = 2'-O-methyladenosine-3'-phosphate
  modified_base 15: mod_base = OTHER; note = 2'-O-methyladenosine-3'-phosphate
  modified_base 16: mod_base = OTHER; note = 2'-O-methyladenosine-3'-phosphate
  modified_base 17: mod_base = OTHER; note = 2'-O-methylguanosine-3'-phosphate
  modified_base 18: mod_base = OTHER; note = 2'-O-methylguanosine-3'-phosphate
  modified_base 19: mod_base = OTHER; note = 2'-O-methyladenosine-3'-phosphate
  modified_base 20: mod_base = OTHER; note = 2'-O-methyladenosine-3'-phosphate
  modified_base 21: mod_base = OTHER; note = 2'-O-methyluridine-3'-phosphate ((2S,4R)-1-[29-[[2-(acetylamino)-2-deoxy-beta-D-galactopyra nosyl]oxy]-14,14-bis[[3-[[3-[[5-[[2-(acetylamino)-2-deoxy-b eta-D-galactopyranosyl]oxy]-1-oxopentyl]amino]propyl]amino] -3-oxopropoxy]methyl]-1,12,19,25-tetraoxo-16-oxa-13,20,24-t riazanonacos-1-yl]-4-hydroxy-2-pyrrolidinyl)methyl ester
atccagttagatgaaaggaat

SEQ ID NO: 404 - RNA, 21 nt, synthetic construct
  source 1..21: mol_type = other RNA
  modified_base 1: mod_base = OTHER; note = 2'-O-methyladenosine-3'-phosphorothioate
  modified_base 2: mod_base = OTHER; note = 2'-O-methyladenosine-3'-phosphorothioate
  modified_base 3: mod_base = OTHER; note = 2'-O-methylguanosine-3'-phosphate
  modified_base 4: mod_base = OTHER; note = 2'-O-methylguanosine-3'-phosphate
  modified_base 5: mod_base = OTHER; note = 2'-O-methyladenosine-3'-phosphate
  modified_base 6: mod_base = OTHER; note = 2'-O-methyladenosine-3'-phosphate
  modified_base 7: mod_base = OTHER; note = 2'-deoxy-2'-fluorouridine-3'-phosphate
  modified_base 8: mod_base = OTHER; note = 2'-O-methyladenosine-3'-phosphate
  modified_base 9: mod_base = OTHER; note = 2'-deoxy-2'-fluoroadenosine-3'-phosphate
  modified_base 10: mod_base = OTHER; note = 2'-deoxy-2'-fluorouridine-3'-phosphate
  modified_base 11: mod_base = OTHER; note = 2'-deoxy-2'-fluoroadenosine-3'-phosphate
  modified_base 12: mod_base = OTHER; note = 2'-O-methyluridine-3'-phosphate
  modified_base 13: mod_base = OTHER; note = 2'-O-methyladenosine-3'-phosphate
  modified_base 14: mod_base = OTHER; note = 2'-O-methylguanosine-3'-phosphate
  modified_base 15: mod_base = OTHER; note = 2'-O-methyladenosine-3'-phosphate
  modified_base 16: mod_base = OTHER; note = 2'-O-methyluridine-3'-phosphate
  modified_base 17: mod_base = OTHER; note = 2'-O-methyladenosine-3'-phosphate
  modified_base 18: mod_base = OTHER; note = 2'-O-methylguanosine-3'-phosphate
  modified_base 19: mod_base = OTHER; note = 2'-O-methyluridine-3'-phosphate
  modified_base 20: mod_base = OTHER; note = 2'-O-methylguanosine-3'-phosphate
  modified_base 21: mod_base = OTHER; note = 2'-O-methyluridine-3'-phosphate ((2S,4R)-1-[29-[[2-(acetylamino)-2-deoxy-beta-D-galactopyra nosyl]oxy]-14,14-bis[[3-[[3-[[5-[[2-(acetylamino)-2-deoxy-b eta-D-galactopyranosyl]oxy]-1-oxopentyl]amino]propyl]amino] -3-oxopropoxy]methyl]-1,12,19,25-tetraoxo-16-oxa-13,20,24-t riazanonacos-1-yl]-4-hydroxy-2-pyrrolidinyl)methyl ester
aaggaataatatagatagtgt

SEQ ID NO: 405 - RNA, 21 nt, synthetic construct
  source 1..21: mol_type = other RNA
  modified_base 1: mod_base = OTHER; note = 2'-O-methylguanosine-3'-phosphorothioate
  modified_base 2: mod_base = OTHER; note = 2'-O-methyladenosine-3'-phosphorothioate
  modified_base 3: mod_base = OTHER; note = 2'-O-methyluridine-3'-phosphate
  modified_base 4: mod_base = OTHER; note = 2'-O-methyladenosine-3'-phosphate
  modified_base 5: mod_base = OTHER; note = 2'-O-methylguanosine-3'-phosphate
  modified_base 6: mod_base = OTHER; note = 2'-O-methyluridine-3'-phosphate
  modified_base 7: mod_base = OTHER; note = 2'-deoxy-2'-fluoroguanosine-3'-phosphate
  modified_base 8: mod_base = OTHER; note = 2'-O-methyluridine-3'-phosphate
  modified_base 9: mod_base = OTHER; note = 2'-deoxy-2'-fluorouridine-3'-phosphate
  modified_base 10: mod_base = OTHER; note = 2'-deoxy-2'-fluorocytidine-3'-phosphate
  modified_base 11: mod_base = OTHER; note = 2'-deoxy-2'-fluoroadenosine-3'-phosphate
  modified_base 12: mod_base = OTHER; note = 2'-O-methylguanosine-3'-phosphate
  modified_base 13: mod_base = OTHER; note = 2'-O-methyluridine-3'-phosphate
  modified_base 14: mod_base = OTHER; note = 2'-O-methyladenosine-3'-phosphate
  modified_base 15: mod_base = OTHER; note = 2'-O-methylguanosine-3'-phosphate
  modified_base 16: mod_base = OTHER; note = 2'-O-methylcytidine-3'-phosphate
  modified_base 17: mod_base = OTHER; note = 2'-O-methyladenosine-3'-phosphate
  modified_base 18: mod_base = OTHER; note = 2'-O-methylguanosine-3'-phosphate
  modified_base 19: mod_base = OTHER; note = 2'-O-methyladenosine-3'-phosphate
  modified_base 20: mod_base = OTHER; note = 2'-O-methyladenosine-3'-phosphate
  modified_base 21: mod_base = OTHER; note = 2'-O-methyluridine-3'-phosphate ((2S,4R)-1-[29-[[2-(acetylamino)-2-deoxy-beta-D-galactopyra nosyl]oxy]-14,14-bis[[3-[[3-[[5-[[2-(acetylamino)-2-deoxy-b eta-D-galactopyranosyl]oxy]-1-oxopentyl]amino]propyl]amino] -3-oxopropoxy]methyl]-1,12,19,25-tetraoxo-16-oxa-13,20,24-t riazanonacos-1-yl]-4-hydroxy-2-pyrrolidinyl)methyl ester
gatagtgttcagtagcagaat

SEQ ID NO: 406 - RNA, 21 nt, synthetic construct
  source 1..21: mol_type = other RNA
  modified_base 1: mod_base = OTHER; note = 2'-O-methylguanosine-3'-phosphorothioate
  modified_base 2: mod_base = OTHER; note = 2'-O-methyladenosine-3'-phosphorothioate
  modified_base 3: mod_base = OTHER; note = 2'-O-methyladenosine-3'-phosphate
  modified_base 4: mod_base = OTHER; note = 2'-O-methyluridine-3'-phosphate
  modified_base 5: mod_base = OTHER; note = 2'-O-methyladenosine-3'-phosphate
  modified_base 6: mod_base = OTHER; note = 2'-O-methylguanosine-3'-phosphate
  modified_base 7: mod_base = OTHER; note = 2'-deoxy-2'-fluoroadenosine-3'-phosphate
  modified_base 8: mod_base = OTHER; note = 2'-O-methyladenosine-3'-phosphate
  modified_base 9: mod_base = OTHER; note = 2'-deoxy-2'-fluorouridine-3'-phosphate
  modified_base 10: mod_base = OTHER; note = 2'-deoxy-2'-fluoroguanosine-3'-phosphate
  modified_base 11: mod_base = OTHER; note = 2'-deoxy-2'-fluoroadenosine-3'-phosphate
  modified_base 12: mod_base = OTHER; note = 2'-O-methyladenosine-3'-phosphate
  modified_base 13: mod_base = OTHER; note = 2'-O-methylcytidine-3'-phosphate
  modified_base 14: mod_base = OTHER; note = 2'-O-methyladenosine-3'-phosphate
  modified_base 15: mod_base = OTHER; note = 2'-O-methyluridine-3'-phosphate
  modified_base 16: mod_base = OTHER; note = 2'-O-methyladenosine-3'-phosphate
  modified_base 17: mod_base = OTHER; note = 2'-O-methyladenosine-3'-phosphate
  modified_base 18: mod_base = OTHER; note = 2'-O-methyladenosine-3'-phosphate
  modified_base 19: mod_base = OTHER; note = 2'-O-methylcytidine-3'-phosphate
  modified_base 20: mod_base = OTHER; note = 2'-O-methyluridine-3'-phosphate
  modified_base 21: mod_base = OTHER; note = 2'-O-methyluridine-3'-phosphate ((2S,4R)-1-[29-[[2-(acetylamino)-2-deoxy-beta-D-galactopyra nosyl]oxy]-14,14-bis[[3-[[3-[[5-[[2-(acetylamino)-2-deoxy-b eta-D-galactopyranosyl]oxy]-1-oxopentyl]amino]propyl]amino] -3-oxopropoxy]methyl]-1,12,19,25-tetraoxo-16-oxa-13,20,24-t riazanonacos-1-yl]-4-hydroxy-2-pyrrolidinyl)methyl ester
gaatagaatgaacataaactt

SEQ ID NO: 407 - RNA, 21 nt, synthetic construct
  source 1..21: mol_type = other RNA
  modified_base 1: mod_base = OTHER; note = 2'-O-methyladenosine-3'-phosphorothioate
  modified_base 2: mod_base = OTHER; note = 2'-O-methyladenosine-3'-phosphorothioate
  modified_base 3: mod_base = OTHER; note = 2'-O-methyluridine-3'-phosphate
  modified_base 4: mod_base = OTHER; note = 2'-O-methyluridine-3'-phosphate
  modified_base 5: mod_base = OTHER; note = 2'-O-methylcytidine-3'-phosphate
  modified_base 6: mod_base = OTHER; note = 2'-O-methylcytidine-3'-phosphate
  modified_base 7: mod_base = OTHER; note = 2'-deoxy-2'-fluorouridine-3'-phosphate
  modified_base 8: mod_base = OTHER; note = 2'-O-methyluridine-3'-phosphate
  modified_base 9: mod_base = OTHER; note = 2'-deoxy-2'-fluorocytidine-3'-phosphate
  modified_base 10: mod_base = OTHER; note = 2'-deoxy-2'-fluorouridine-3'-phosphate
  modified_base 11: mod_base = OTHER; note = 2'-deoxy-2'-fluoroadenosine-3'-phosphate
  modified_base 12: mod_base = OTHER; note = 2'-O-methyluridine-3'-phosphate
  modified_base 13: mod_base = OTHER; note = 2'-O-methyluridine-3'-phosphate
  modified_base 14: mod_base = OTHER; note = 2'-O-methyluridine-3'-phosphate
  modified_base 15: mod_base = OTHER; note = 2'-O-methylguanosine-3'-phosphate
  modified_base 16: mod_base = OTHER; note = 2'-O-methyladenosine-3'-phosphate
  modified_base 17: mod_base = OTHER; note = 2'-O-methyluridine-3'-phosphate
  modified_base 18: mod_base = OTHER; note = 2'-O-methylcytidine-3'-phosphate
  modified_base 19: mod_base = OTHER; note = 2'-O-methyladenosine-3'-phosphate
  modified_base 20: mod_base = OTHER; note = 2'-O-methyluridine-3'-phosphate
  modified_base 21: mod_base = OTHER; note = 2'-O-methyluridine-3'-phosphate ((2S,4R)-1-[29-[[2-(acetylamino)-2-deoxy-beta-D-galactopyra nosyl]oxy]-14,14-bis[[3-[[3-[[5-[[2-(acetylamino)-2-deoxy-b eta-D-galactopyranosyl]oxy]-1-oxopentyl]amino]propyl]amino] -3-oxopropoxy]methyl]-1,12,19,25-tetraoxo-16-oxa-13,20,24-t riazanonacos-1-yl]-4-hydroxy-2-pyrrolidinyl)methyl ester
aattccttctatttgatcatt

SEQ ID NO: 408 - RNA, 21 nt, synthetic construct
  source 1..21: mol_type = other RNA
  modified_base 1: mod_base = OTHER; note = 2'-O-methyluridine-3'-phosphorothioate
  modified_base 2: mod_base = OTHER; note = 2'-O-methyladenosine-3'-phosphorothioate
  modified_base 3: mod_base = OTHER; note = 2'-O-methylguanosine-3'-phosphate
  modified_base 4: mod_base = OTHER; note = 2'-O-methyluridine-3'-phosphate
  modified_base 5: mod_base = OTHER; note = 2'-O-methylcytidine-3'-phosphate
  modified_base 6: mod_base = OTHER; note = 2'-O-methylcytidine-3'-phosphate
  modified_base 7: mod_base = OTHER; note = 2'-deoxy-2'-fluoroadenosine-3'-phosphate
  modified_base 8: mod_base = OTHER; note = 2'-O-methyladenosine-3'-phosphate
  modified_base 9: mod_base = OTHER; note = 2'-deoxy-2'-fluorocytidine-3'-phosphate
  modified_base 10: mod_base = OTHER; note = 2'-deoxy-2'-fluorouridine-3'-phosphate
  modified_base 11: mod_base = OTHER; note = 2'-deoxy-2'-fluorouridine-3'-phosphate
  modified_base 12: mod_base = OTHER; note = 2'-O-methyladenosine-3'-phosphate
  modified_base 13: mod_base = OTHER; note = 2'-O-methyladenosine-3'-phosphate
  modified_base 14: mod_base = OTHER; note = 2'-O-methyluridine-3'-phosphate
  modified_base 15: mod_base = OTHER; note = 2'-O-methyladenosine-3'-phosphate
  modified_base 16: mod_base = OTHER; note = 2'-O-methylcytidine-3'-phosphate
  modified_base 17: mod_base = OTHER; note = 2'-O-methylcytidine-3'-phosphate
  modified_base 18: mod_base = OTHER; note = 2'-O-methyluridine-3'-phosphate
  modified_base 19: mod_base = OTHER; note = 2'-O-methyladenosine-3'-phosphate
  modified_base 20: mod_base = OTHER; note = 2'-O-methylguanosine-3'-phosphate
  modified_base 21: mod_base = OTHER; note = 2'-O-methyluridine-3'-phosphate ((2S,4R)-1-[29-[[2-(acetylamino)-2-deoxy-beta-D-galactopyra nosyl]oxy]-14,14-bis[[3-[[3-[[5-[[2-(acetylamino)-2-deoxy-b eta-D-galactopyranosyl]oxy]-1-oxopentyl]amino]propyl]amino] -3-oxopropoxy]methyl]-1,12,19,25-tetraoxo-16-oxa-13,20,24-t riazanonacos-1-yl]-4-hydroxy-2-pyrrolidinyl)methyl ester
tagtccaacttaatacctagt

SEQ ID NO: 409 - RNA, 21 nt, synthetic construct
  source 1..21: mol_type = other RNA
  modified_base 1: mod_base = OTHER; note = 2'-O-methylcytidine-3'-phosphorothioate
  modified_base 2: mod_base = OTHER; note = 2'-O-methyluridine-3'-phosphorothioate
  modified_base 3: mod_base = OTHER; note = 2'-O-methyladenosine-3'-phosphate
  modified_base 4: mod_base = OTHER; note = 2'-O-methylguanosine-3'-phosphate
  modified_base 5: mod_base = OTHER; note = 2'-O-methylcytidine-3'-phosphate
  modified_base 6: mod_base = OTHER; note = 2'-O-methylcytidine-3'-phosphate
  modified_base 7: mod_base = OTHER; note = 2'-deoxy-2'-fluorouridine-3'-phosphate
  modified_base 8: mod_base = OTHER; note = 2'-O-methyluridine-3'-phosphate
  modified_base 9: mod_base = OTHER; note = 2'-deoxy-2'-fluoroadenosine-3'-phosphate
  modified_base 10: mod_base = OTHER; note = 2'-deoxy-2'-fluorouridine-3'-phosphate
  modified_base 11: mod_base = OTHER; note = 2'-deoxy-2'-fluoroguanosine-3'-phosphate
  modified_base 12: mod_base = OTHER; note = 2'-O-methyladenosine-3'-phosphate
  modified_base 13: mod_base = OTHER; note = 2'-O-methylguanosine-3'-phosphate
  modified_base 14: mod_base = OTHER; note = 2'-O-methyluridine-3'-phosphate
  modified_base 15: mod_base = OTHER; note = 2'-O-methyluridine-3'-phosphate
  modified_base 16: mod_base = OTHER; note = 2'-O-methylguanosine-3'-phosphate
  modified_base 17: mod_base = OTHER; note = 2'-O-methyluridine-3'-phosphate
  modified_base 18: mod_base = OTHER; note = 2'-O-methyladenosine-3'-phosphate
  modified_base 19: mod_base = OTHER; note = 2'-O-methyluridine-3'-phosphate
  modified_base 20: mod_base = OTHER; note = 2'-O-methyladenosine-3'-phosphate
  modified_base 21: mod_base = OTHER; note = 2'-O-methyluridine-3'-phosphate ((2S,4R)-1-[29-[[2-(acetylamino)-2-deoxy-beta-D-galactopyra nosyl]oxy]-14,14-bis[[3-[[3-[[5-[[2-(acetylamino)-2-deoxy-b eta-D-galactopyranosyl]oxy]-1-oxopentyl]amino]propyl]amino] -3-oxopropoxy]methyl]-1,12,19,25-tetraoxo-16-oxa-13,20,24-t riazanonacos-1-yl]-4-hydroxy-2-pyrrolidinyl)methyl ester
ctagccttatgagttgtatat

SEQ ID NO: 410 - RNA, 21 nt, synthetic construct
  source 1..21: mol_type = other RNA
  modified_base 1: mod_base = OTHER; note = 2'-O-methyluridine-3'-phosphorothioate
  modified_base 2: mod_base = OTHER; note = 2'-O-methyladenosine-3'-phosphorothioate
  modified_base 3: mod_base = OTHER; note = 2'-O-methyluridine-3'-phosphate
  modified_base 4: mod_base = OTHER; note = 2'-O-methyladenosine-3'-phosphate
  modified_base 5: mod_base = OTHER; note = 2'-O-methyladenosine-3'-phosphate
  modified_base 6: mod_base = OTHER; note = 2'-O-methylguanosine-3'-phosphate
  modified_base 7: mod_base = OTHER; note = 2'-deoxy-2'-fluoroguanosine-3'-phosphate
  modified_base 8: mod_base = OTHER; note = 2'-O-methyluridine-3'-phosphate
  modified_base 9: mod_base = OTHER; note = 2'-deoxy-2'-fluoroadenosine-3'-phosphate
  modified_base 10: mod_base = OTHER; note = 2'-deoxy-2'-fluoroadenosine-3'-phosphate
  modified_base 11: mod_base = OTHER; note = 2'-deoxy-2'-fluoroguanosine-3'-phosphate
  modified_base 12: mod_base = OTHER; note = 2'-O-methylguanosine-3'-phosphate
  modified_base 13: mod_base = OTHER; note = 2'-O-methyluridine-3'-phosphate
  modified_base 14: mod_base = OTHER; note = 2'-O-methyluridine-3'-phosphate
  modified_base 15: mod_base = OTHER; note = 2'-O-methyladenosine-3'-phosphate
  modified_base 16: mod_base = OTHER; note = 2'-O-methylcytidine-3'-phosphate
  modified_base 17: mod_base = OTHER; note = 2'-O-methylcytidine-3'-phosphate
  modified_base 18: mod_base = OTHER; note = 2'-O-methyluridine-3'-phosphate
  modified_base 19: mod_base = OTHER; note = 2'-O-methyladenosine-3'-phosphate
  modified_base 20: mod_base = OTHER; note = 2'-O-methylcytidine-3'-phosphate
  modified_base 21: mod_base = OTHER; note = 2'-O-methyluridine-3'-phosphate ((2S,4R)-1-[29-[[2-(acetylamino)-2-deoxy-beta-D-galactopyra nosyl]oxy]-14,14-bis[[3-[[3-[[5-[[2-(acetylamino)-2-deoxy-b eta-D-galactopyranosyl]oxy]-1-oxopentyl]amino]propyl]amino] -3-oxopropoxy]methyl]-1,12,19,25-tetraoxo-16-oxa-13,20,24-t riazanonacos-1-yl]-4-hydroxy-2-pyrrolidinyl)methyl ester
tataaggtaaggttacctact

SEQ ID NO: 411 - RNA, 21 nt, synthetic construct
  source 1..21: mol_type = other RNA
  modified_base 1: mod_base = OTHER; note = 2'-O-methyluridine-3'-phosphorothioate
  modified_base 2: mod_base = OTHER; note = 2'-O-methyladenosine-3'-phosphorothioate
  modified_base 3: mod_base = OTHER; note = 2'-O-methylcytidine-3'-phosphate
  modified_base 4: mod_base = OTHER; note = 2'-O-methylcytidine-3'-phosphate
  modified_base 5: mod_base = OTHER; note = 2'-O-methyluridine-3'-phosphate
  modified_base 6: mod_base = OTHER; note = 2'-O-methyladenosine-3'-phosphate
  modified_base 7: mod_base = OTHER; note = 2'-deoxy-2'-fluorocytidine-3'-phosphate
  modified_base 8: mod_base = OTHER; note = 2'-O-methylcytidine-3'-phosphate
  modified_base 9: mod_base = OTHER; note = 2'-deoxy-2'-fluorouridine-3'-phosphate
  modified_base 10: mod_base = OTHER; note = 2'-deoxy-2'-fluoroguanosine-3'-phosphate
  modified_base 11: mod_base = OTHER; note = 2'-deoxy-2'-fluoroadenosine-3'-phosphate
  modified_base 12: mod_base = OTHER; note = 2'-O-methylguanosine-3'-phosphate
  modified_base 13: mod_base = OTHER; note = 2'-O-methyladenosine-3'-phosphate
  modified_base 14: mod_base = OTHER; note = 2'-O-methyladenosine-3'-phosphate
  modified_base 15: mod_base = OTHER; note = 2'-O-methylguanosine-3'-phosphate
  modified_base 16: mod_base = OTHER; note = 2'-O-methylcytidine-3'-phosphate
  modified_base 17: mod_base = OTHER; note = 2'-O-methyluridine-3'-phosphate
  modified_base 18: mod_base = OTHER; note = 2'-O-methylguanosine-3'-phosphate
  modified_base 19: mod_base = OTHER; note = 2'-O-methyladenosine-3'-phosphate
  modified_base 20: mod_base = OTHER; note = 2'-O-methyluridine-3'-phosphate
  modified_base 21: mod_base = OTHER; note = 2'-O-methyluridine-3'-phosphate ((2S,4R)-1-[29-[[2-(acetylamino)-2-deoxy-beta-D-galactopyra nosyl]oxy]-14,14-bis[[3-[[3-[[5-[[2-(acetylamino)-2-deoxy-b eta-D-galactopyranosyl]oxy]-1-oxopentyl]amino]propyl]amino] -3-oxopropoxy]methyl]-1,12,19,25-tetraoxo-16-oxa-13,20,24-t riazanonacos-1-yl]-4-hydroxy-2-pyrrolidinyl)methyl ester
tacctacctgagaagctgatt

SEQ ID NO: 412 - RNA, 21 nt, synthetic construct
  source 1..21: mol_type = other RNA
  modified_base 1: mod_base = OTHER; note = 2'-O-methyladenosine-3'-phosphorothioate
  modified_base 2: mod_base = OTHER; note = 2'-O-methylguanosine-3'-phosphorothioate
  modified_base 3: mod_base = OTHER; note = 2'-O-methylcytidine-3'-phosphate
  modified_base 4: mod_base = OTHER; note = 2'-O-methyluridine-3'-phosphate
  modified_base 5: mod_base = OTHER; note = 2'-O-methylguanosine-3'-phosphate
  modified_base 6: mod_base = OTHER; note = 2'-O-methyladenosine-3'-phosphate
  modified_base 7: mod_base = OTHER; note = 2'-deoxy-2'-fluorouridine-3'-phosphate
  modified_base 8: mod_base = OTHER; note = 2'-O-methyluridine-3'-phosphate
  modified_base 9: mod_base = OTHER; note = 2'-deoxy-2'-fluoroadenosine-3'-phosphate
  modified_base 10: mod_base = OTHER; note = 2'-deoxy-2'-fluoroadenosine-3'-phosphate
  modified_base 11: mod_base = OTHER; note = 2'-deoxy-2'-fluorocytidine-3'-phosphate
  modified_base 12: mod_base = OTHER; note = 2'-O-methyladenosine-3'-phosphate
  modified_base 13: mod_base = OTHER; note = 2'-O-methyluridine-3'-phosphate
  modified_base 14: mod_base = OTHER; note = 2'-O-methyluridine-3'-phosphate
  modified_base 15: mod_base = OTHER; note = 2'-O-methylguanosine-3'-phosphate
  modified_base 16: mod_base = OTHER; note = 2'-O-methylguanosine-3'-phosphate
  modified_base 17: mod_base = OTHER; note = 2'-O-methyluridine-3'-phosphate
  modified_base 18: mod_base = OTHER; note = 2'-O-methyluridine-3'-phosphate
  modified_base 19: mod_base = OTHER; note = 2'-O-methylguanosine-3'-phosphate
  modified_base 20: mod_base = OTHER; note = 2'-O-methyluridine-3'-phosphate
  modified_base 21: mod_base = OTHER; note = 2'-O-methyluridine-3'-phosphate ((2S,4R)-1-[29-[[2-(acetylamino)-2-deoxy-beta-D-galactopyra nosyl]oxy]-14,14-bis[[3-[[3-[[5-[[2-(acetylamino)-2-deoxy-b eta-D-galactopyranosyl]oxy]-1-oxopentyl]amino]propyl]amino] -3-oxopropoxy]methyl]-1,12,19,25-tetraoxo-16-oxa-13,20,24-t riazanonacos-1-yl]-4-hydroxy-2-pyrrolidinyl)methyl ester
agctgattaacattggttgtt

SEQ ID NO: 413 - RNA, 21 nt, synthetic construct
  source 1..21: mol_type = other RNA
  modified_base 1: mod_base = OTHER; note = 2'-O-methyluridine-3'-phosphorothioate
  modified_base 2: mod_base = OTHER; note = 2'-O-methyluridine-3'-phosphorothioate
  modified_base 3: mod_base = OTHER; note = 2'-O-methylguanosine-3'-phosphate
  modified_base 4: mod_base = OTHER; note = 2'-O-methyluridine-3'-phosphate
  modified_base 5: mod_base = OTHER; note = 2'-O-methyladenosine-3'-phosphate
  modified_base 6: mod_base = OTHER; note = 2'-O-methylcytidine-3'-phosphate
  modified_base 7: mod_base = OTHER; note = 2'-deoxy-2'-fluoroadenosine-3'-phosphate
  modified_base 8: mod_base = OTHER; note = 2'-O-methyladenosine-3'-phosphate
  modified_base 9: mod_base = OTHER; note = 2'-deoxy-2'-fluorouridine-3'-phosphate
  modified_base 10: mod_base = OTHER; note = 2'-deoxy-2'-fluorocytidine-3'-phosphate
  modified_base 11: mod_base = OTHER; note = 2'-deoxy-2'-fluorouridine-3'-phosphate
  modified_base 12: mod_base = OTHER; note = 2'-O-methyluridine-3'-phosphate
  modified_base 13: mod_base = OTHER; note = 2'-O-methyladenosine-3'-phosphate
  modified_base 14: mod_base = OTHER; note = 2'-O-methyluridine-3'-phosphate
  modified_base 15: mod_base = OTHER; note = 2'-O-methyluridine-3'-phosphate
  modified_base 16: mod_base = OTHER; note = 2'-O-methylcytidine-3'-phosphate
  modified_base 17: mod_base = OTHER; note = 2'-O-methyladenosine-3'-phosphate
  modified_base 18: mod_base = OTHER; note = 2'-O-methyluridine-3'-phosphate
  modified_base 19: mod_base = OTHER; note = 2'-O-methyluridine-3'-phosphate
  modified_base 20: mod_base = OTHER; note = 2'-O-methyladenosine-3'-phosphate
  modified_base 21: mod_base = OTHER; note = 2'-O-methyluridine-3'-phosphate ((2S,4R)-1-[29-[[2-(acetylamino)-2-deoxy-beta-D-galactopyra nosyl]oxy]-14,14-bis[[3-[[3-[[5-[[2-(acetylamino)-2-deoxy-b eta-D-galactopyranosyl]oxy]-1-oxopentyl]amino]propyl]amino] -3-oxopropoxy]methyl]-1,12,19,25-tetraoxo-16-oxa-13,20,24-t riazanonacos-1-yl]-4-hydroxy-2-pyrrolidinyl)methyl ester
ttgtacaatcttattcattat

SEQ ID NO: 414 - RNA, 21 nt, synthetic construct
  source 1..21: mol_type = other RNA
  modified_base 1: mod_base = OTHER; note = 2'-O-methyladenosine-3'-phosphorothioate
  modified_base 2: mod_base = OTHER; note = 2'-O-methyluridine-3'-phosphorothioate
  modified_base 3: mod_base = OTHER; note = 2'-O-methyluridine-3'-phosphate
  modified_base 4: mod_base = OTHER; note = 2'-O-methyladenosine-3'-phosphate
  modified_base 5: mod_base = OTHER; note = 2'-O-methylguanosine-3'-phosphate
  modified_base 6: mod_base = OTHER; note = 2'-O-methyladenosine-3'-phosphate
  modified_base 7: mod_base = OTHER; note = 2'-deoxy-2'-fluoroguanosine-3'-phosphate
  modified_base 8: mod_base = OTHER; note = 2'-O-methyladenosine-3'-phosphate
  modified_base 9: mod_base = OTHER; note = 2'-deoxy-2'-fluoroadenosine-3'-phosphate
  modified_base 10: mod_base = OTHER; note = 2'-deoxy-2'-fluorocytidine-3'-phosphate
  modified_base 11: mod_base = OTHER; note = 2'-deoxy-2'-fluoroadenosine-3'-phosphate
  modified_base 12: mod_base = OTHER; note = 2'-O-methyluridine-3'-phosphate
  modified_base 13: mod_base = OTHER; note = 2'-O-methylguanosine-3'-phosphate
  modified_base 14: mod_base = OTHER; note = 2'-O-methylguanosine-3'-phosphate
  modified_base 15: mod_base = OTHER; note = 2'-O-methyluridine-3'-phosphate
  modified_base 16: mod_base = OTHER; note = 2'-O-methylguanosine-3'-phosphate
  modified_base 17: mod_base = OTHER; note = 2'-O-methylcytidine-3'-phosphate
  modified_base 18: mod_base = OTHER; note = 2'-O-methyluridine-3'-phosphate
  modified_base 19: mod_base = OTHER; note = 2'-O-methyluridine-3'-phosphate
  modified_base 20: mod_base = OTHER; note = 2'-O-methyladenosine-3'-phosphate
  modified_base 21: mod_base = OTHER; note = 2'-O-methyluridine-3'-phosphate ((2S,4R)-1-[29-[[2-(acetylamino)-2-deoxy-beta-D-galactopyra nosyl]oxy]-14,14-bis[[3-[[3-[[5-[[2-(acetylamino)-2-deoxy-b eta-D-galactopyranosyl]oxy]-1-oxopentyl]amino]propyl]amino] -3-oxopropoxy]methyl]-1,12,19,25-tetraoxo-16-oxa-13,20,24-t riazanonacos-1-yl]-4-hydroxy-2-pyrrolidinyl)methyl ester
attagagaacatggtgcttat

SEQ ID NO: 415 - RNA, 21 nt, synthetic construct
  source 1..21: mol_type = other RNA
  modified_base 1: mod_base = OTHER; note = 2'-O-methylguanosine-3'-phosphorothioate
  modified_base 2: mod_base = OTHER; note = 2'-O-methylguanosine-3'-phosphorothioate
  modified_base 3: mod_base = OTHER; note = 2'-O-methyluridine-3'-phosphate
  modified_base 4: mod_base = OTHER; note = 2'-O-methylguanosine-3'-phosphate
  modified_base 5: mod_base = OTHER; note = 2'-O-methylcytidine-3'-phosphate
  modified_base 6: mod_base = OTHER; note = 2'-O-methyluridine-3'-phosphate
  modified_base 7: mod_base = OTHER; note = 2'-deoxy-2'-fluorouridine-3'-phosphate
  modified_base 8: mod_base = OTHER; note = 2'-O-methyladenosine-3'-phosphate
  modified_base 9: mod_base = OTHER; note = 2'-deoxy-2'-fluoroguanosine-3'-phosphate
  modified_base 10: mod_base = OTHER; note = 2'-deoxy-2'-fluoroguanosine-3'-phosphate
  modified_base 11: mod_base = OTHER; note = 2'-deoxy-2'-fluoroguanosine-3'-phosphate
  modified_base 12: mod_base = OTHER; note = 2'-O-methyluridine-3'-phosphate
  modified_base 13: mod_base = OTHER; note = 2'-O-methylcytidine-3'-phosphate
  modified_base 14: mod_base = OTHER; note = 2'-O-methyluridine-3'-phosphate
  modified_base 15: mod_base = OTHER; note = 2'-O-methylguanosine-3'-phosphate
  modified_base 16: mod_base = OTHER; note = 2'-O-methyladenosine-3'-phosphate
  modified_base 17: mod_base = OTHER; note = 2'-O-methylguanosine-3'-phosphate
  modified_base 18: mod_base = OTHER; note = 2'-O-methyladenosine-3'-phosphate
  modified_base 19: mod_base = OTHER; note = 2'-O-methylcytidine-3'-phosphate
  modified_base 20: mod_base = OTHER; note = 2'-O-methylcytidine-3'-phosphate
  modified_base 21: mod_base = OTHER; note = 2'-O-methyluridine-3'-phosphate ((2S,4R)-1-[29-[[2-(acetylamino)-2-deoxy-beta-D-galactopyra nosyl]oxy]-14,14-bis[[3-[[3-[[5-[[2-(acetylamino)-2-deoxy-b eta-D-galactopyranosyl]oxy]-1-oxopentyl]amino]propyl]amino] -3-oxopropoxy]methyl]-1,12,19,25-tetraoxo-16-oxa-13,20,24-t riazanonacos-1-yl]-4-hydroxy-2-pyrrolidinyl)methyl ester
ggtgcttagggtctgagacct

SEQ ID NO: 416 - RNA, 21 nt, synthetic construct
  source 1..21: mol_type = other RNA
  modified_base 1: mod_base = OTHER; note = 2'-O-methyluridine-3'-phosphorothioate
  modified_base 2: mod_base = OTHER; note = 2'-O-methylguanosine-3'-phosphorothioate
  modified_base 3: mod_base = OTHER; note = 2'-O-methyladenosine-3'-phosphate
  modified_base 4: mod_base = OTHER; note = 2'-O-methylguanosine-3'-phosphate
  modified_base 5: mod_base = OTHER; note = 2'-O-methyladenosine-3'-phosphate
  modified_base 6: mod_base = OTHER; note = 2'-O-methylcytidine-3'-phosphate
  modified_base 7: mod_base = OTHER; note = 2'-deoxy-2'-fluorocytidine-3'-phosphate
  modified_base 8: mod_base = OTHER; note = 2'-O-methyluridine-3'-phosphate
  modified_base 9: mod_base = OTHER; note = 2'-deoxy-2'-fluorouridine-3'-phosphate
  modified_base 10: mod_base = OTHER; note = 2'-deoxy-2'-fluorouridine-3'-phosphate
  modified_base 11: mod_base = OTHER; note = 2'-deoxy-2'-fluorouridine-3'-phosphate
  modified_base 12: mod_base = OTHER; note = 2'-O-methylguanosine-3'-phosphate
  modified_base 13: mod_base = OTHER; note = 2'-O-methyladenosine-3'-phosphate
  modified_base 14: mod_base = OTHER; note = 2'-O-methyladenosine-3'-phosphate
  modified_base 15: mod_base = OTHER; note = 2'-O-methyladenosine-3'-phosphate
  modified_base 16: mod_base = OTHER; note = 2'-O-methylguanosine-3'-phosphate
  modified_base 17: mod_base = OTHER; note = 2'-O-methylguanosine-3'-phosphate
  modified_base 18: mod_base = OTHER; note = 2'-O-methyluridine-3'-phosphate
  modified_base 19: mod_base = OTHER; note = 2'-O-methylcytidine-3'-phosphate
  modified_base 20: mod_base = OTHER; note = 2'-O-methyluridine-3'-phosphate
  modified_base 21: mod_base = OTHER; note = 2'-O-methyluridine-3'-phosphate ((2S,4R)-1-[29-[[2-(acetylamino)-2-deoxy-beta-D-galactopyra nosyl]oxy]-14,14-bis[[3-[[3-[[5-[[2-(acetylamino)-2-deoxy-b eta-D-galactopyranosyl]oxy]-1-oxopentyl]amino]propyl]amino] -3-oxopropoxy]methyl]-1,12,19,25-tetraoxo-16-oxa-13,20,24-t riazanonacos-1-yl]-4-hydroxy-2-pyrrolidinyl)methyl ester
tgagaccttttgaaaggtctt

SEQ ID NO: 417 - RNA, 21 nt, synthetic construct
  source 1..21: mol_type = other RNA
  modified_base 1: mod_base = OTHER; note = 2'-O-methyladenosine-3'-phosphorothioate
  modified_base 2: mod_base = OTHER; note = 2'-O-methyladenosine-3'-phosphorothioate
  modified_base 3: mod_base = OTHER; note = 2'-O-methyladenosine-3'-phosphate
  modified_base 4: mod_base = OTHER; note = 2'-O-methylguanosine-3'-phosphate
  modified_base 5: mod_base = OTHER; note = 2'-O-methylguanosine-3'-phosphate
  modified_base 6: mod_base = OTHER; note = 2'-O-methyluridine-3'-phosphate
  modified_base 7: mod_base = OTHER; note = 2'-deoxy-2'-fluorocytidine-3'-phosphate
  modified_base 8: mod_base = OTHER; note = 2'-O-methyluridine-3'-phosphate
  modified_base 9: mod_base = OTHER; note = 2'-deoxy-2'-fluoroguanosine-3'-phosphate
  modified_base 10: mod_base = OTHER; note = 2'-deoxy-2'-fluoroadenosine-3'-phosphate
  modified_base 11: mod_base = OTHER; note = 2'-deoxy-2'-fluoroguanosine-3'-phosphate
  modified_base 12: mod_base = OTHER; note = 2'-O-methyladenosine-3'-phosphate
  modified_base 13: mod_base = OTHER; note = 2'-O-methyladenosine-3'-phosphate
  modified_base 14: mod_base = OTHER; note = 2'-O-methylcytidine-3'-phosphate
  modified_base 15: mod_base = OTHER; note = 2'-O-methyluridine-3'-phosphate
  modified_base 16: mod_base = OTHER; note = 2'-O-methylcytidine-3'-phosphate
  modified_base 17: mod_base = OTHER; note = 2'-O-methyluridine-3'-phosphate
  modified_base 18: mod_base = OTHER; note = 2'-O-methyluridine-3'-phosphate
  modified_base 19: mod_base = OTHER; note = 2'-O-methyluridine-3'-phosphate
  modified_base 20: mod_base = OTHER; note = 2'-O-methyladenosine-3'-phosphate
  modified_base 21: mod_base = OTHER; note = 2'-O-methyluridine-3'-phosphate ((2S,4R)-1-[29-[[2-(acetylamino)-2-deoxy-beta-D-galactopyra nosyl]oxy]-14,14-bis[[3-[[3-[[5-[[2-(acetylamino)-2-deoxy-b eta-D-galactopyranosyl]oxy]-1-oxopentyl]amino]propyl]amino] -3-oxopropoxy]methyl]-1,12,19,25-tetraoxo-16-oxa-13,20,24-t riazanonacos-1-yl]-4-hydroxy-2-pyrrolidinyl)methyl ester
aaaggtctgagaactctttat

SEQ ID NO: 418 - RNA, 21 nt, synthetic construct
  source 1..21: mol_type = other RNA
  modified_base 1: mod_base = OTHER; note = 2'-O-methyladenosine-3'-phosphorothioate
  modified_base 2: mod_base = OTHER; note = 2'-O-methyluridine-3'-phosphorothioate
  modified_base 3: mod_base = OTHER; note = 2'-O-methylcytidine-3'-phosphate
  modified_base 4: mod_base = OTHER; note = 2'-O-methyladenosine-3'-phosphate
  modified_base 5: mod_base = OTHER; note = 2'-O-methylguanosine-3'-phosphate
  modified_base 6: mod_base = OTHER; note = 2'-O-methyluridine-3'-phosphate
  modified_base 7: mod_base = OTHER; note = 2'-deoxy-2'-fluoroadenosine-3'-phosphate
  modified_base 8: mod_base = OTHER; note = 2'-O-methyluridine-3'-phosphate
  modified_base 9: mod_base = OTHER; note = 2'-deoxy-2'-fluoroguanosine-3'-phosphate
  modified_base 10: mod_base = OTHER; note = 2'-deoxy-2'-fluorouridine-3'-phosphate
  modified_base 11: mod_base = OTHER; note = 2'-deoxy-2'-fluoroadenosine-3'-phosphate
  modified_base 12: mod_base = OTHER; note = 2'-O-methyluridine-3'-phosphate
  modified_base 13: mod_base = OTHER; note = 2'-O-methylcytidine-3'-phosphate
  modified_base 14: mod_base = OTHER; note = 2'-O-methyladenosine-3'-phosphate
  modified_base 15: mod_base = OTHER; note = 2'-O-methyluridine-3'-phosphate
  modified_base 16: mod_base = OTHER; note = 2'-O-methylguanosine-3'-phosphate
  modified_base 17: mod_base = OTHER; note = 2'-O-methyluridine-3'-phosphate
  modified_base 18: mod_base = OTHER; note = 2'-O-methyluridine-3'-phosphate
  modified_base 19: mod_base = OTHER; note = 2'-O-methyladenosine-3'-phosphate
  modified_base 20: mod_base = OTHER; note = 2'-O-methyladenosine-3'-phosphate
  modified_base 21: mod_base = OTHER; note = 2'-O-methyluridine-3'-phosphate ((2S,4R)-1-[29-[[2-(acetylamino)-2-deoxy-beta-D-galactopyra nosyl]oxy]-14,14-bis[[3-[[3-[[5-[[2-(acetylamino)-2-deoxy-b eta-D-galactopyranosyl]oxy]-1-oxopentyl]amino]propyl]amino] -3-oxopropoxy]methyl]-1,12,19,25-tetraoxo-16-oxa-13,20,24-t riazanonacos-1-yl]-4-hydroxy-2-pyrrolidinyl)methyl ester
atcagtatgtatcatgttaat

SEQ ID NO: 419 - RNA, 23 nt, synthetic construct
  source 1..23: mol_type = other RNA
  modified_base 1: mod_base = OTHER; note = 2'-O-methyladenosine-3'-phosphorothioate
  modified_base 2: mod_base = OTHER; note = 2'-deoxy-2'-fluoroadenosine-3'-phosphorothioate
  modified_base 3: mod_base = OTHER; note = 2'-O-methylguanosine-3'-phosphate
  modified_base 4: mod_base = OTHER; note = 2'-O-methylguanosine-3'-phosphate
  modified_base 5: mod_base = OTHER; note = 2'-O-methylcytidine-3'-phosphate
  modified_base 6: mod_base = OTHER; note = 2'-deoxy-2'-fluorouridine-3'-phosphate
  modified_base 7: mod_base = OTHER; note = 2'-O-methylguanosine-3'-phosphate
  modified_base 8: mod_base = OTHER; note = 2'-deoxy-2'-fluoroadenosine-3'-phosphate
  modified_base 9: mod_base = OTHER; note = 2'-deoxy-2'-fluorocytidine-3'-phosphate
  modified_base 10: mod_base = OTHER; note = 2'-O-methyladenosine-3'-phosphate
  modified_base 11: mod_base = OTHER; note = 2'-O-methyluridine-3'-phosphate
  modified_base 12: mod_base = OTHER; note = 2'-O-methylguanosine-3'-phosphate
  modified_base 13: mod_base = OTHER; note = 2'-O-methylcytidine-3'-phosphate
  modified_base 14: mod_base = OTHER; note = 2'-deoxy-2'-fluorouridine-3'-phosphate
  modified_base 15: mod_base = OTHER; note = 2'-O-methylguanosine-3'-phosphate
  modified_base 16: mod_base = OTHER; note = 2'-deoxy-2'-fluorocytidine-3'-phosphate
  modified_base 17: mod_base = OTHER; note = 2'-O-methyluridine-3'-phosphate
  modified_base 18: mod_base = OTHER; note = 2'-O-methylcytidine-3'-phosphate
  modified_base 19: mod_base = OTHER; note = 2'-O-methyluridine-3'-phosphate
  modified_base 20: mod_base = OTHER; note = 2'-O-methyluridine-3'-phosphate
  modified_base 21: mod_base = OTHER; note = 2'-O-methylguanosine-3'-phosphorothioate
  modified_base 22: mod_base = OTHER; note = 2'-O-methylcytidine-3'-phosphorothioate
  modified_base 23: mod_base = OTHER; note = 2'-O-methyluridine
aaggctgacatgctgctcttgct

SEQ ID NO: 420 - RNA, 23 nt, synthetic construct
  source 1..23: mol_type = other RNA
  modified_base 1: mod_base = OTHER; note = 2'-O-methyladenosine-3'-phosphorothioate
  modified_base 2: mod_base = OTHER; note = 2'-deoxy-2'-fluoroguanosine-3'-phosphorothioate
  modified_base 3: mod_base = OTHER; note = 2'-O-methyladenosine-3'-phosphate
  modified_base 4: mod_base = OTHER; note = 2'-O-methyluridine-3'-phosphate
  modified_base 5: mod_base = OTHER; note = 2'-O-methyluridine-3'-phosphate
  modified_base 6: mod_base = OTHER; note = 2'-deoxy-2'-fluoroguanosine-3'-phosphate
  modified_base 7: mod_base = OTHER; note = 2'-O-methylcytidine-3'-phosphate
  modified_base 8: mod_base = OTHER; note = 2'-deoxy-2'-fluoroadenosine-3'-phosphate
  modified_base 9: mod_base = OTHER; note = 2'-deoxy-2'-fluoroadenosine-3'-phosphate
  modified_base 10: mod_base = OTHER; note = 2'-O-methylcytidine-3'-phosphate
  modified_base 11: mod_base = OTHER; note = 2'-O-methyluridine-3'-phosphate
  modified_base 12: mod_base = OTHER; note = 2'-O-methylguanosine-3'-phosphate
  modified_base 13: mod_base = OTHER; note = 2'-O-methylcytidine-3'-phosphate
  modified_base 14: mod_base = OTHER; note = 2'-deoxy-2'-fluoroadenosine-3'-phosphate
  modified_base 15: mod_base = OTHER; note = 2'-O-methyladenosine-3'-phosphate
  modified_base 16: mod_base = OTHER; note = 2'-deoxy-2'-fluoroadenosine-3'-phosphate
  modified_base 17: mod_base = OTHER; note = 2'-O-methylguanosine-3'-phosphate
  modified_base 18: mod_base = OTHER; note = 2'-O-methylcytidine-3'-phosphate
  modified_base 19: mod_base = OTHER; note = 2'-O-methyluridine-3'-phosphate
  modified_base 20: mod_base = OTHER; note = 2'-O-methylcytidine-3'-phosphate
  modified_base 21: mod_base = OTHER; note = 2'-O-methylcytidine-3'-phosphorothioate
  modified_base 22: mod_base = OTHER; note = 2'-O-methylguanosine-3'-phosphorothioate
  modified_base 23: mod_base = OTHER; note = 2'-O-methylguanosine
agattgcaactgcaaagctccgg

SEQ ID NO: 421 - RNA, 23 nt, synthetic construct
  source 1..23: mol_type = other RNA
  modified_base 1: mod_base = OTHER; note = 2'-O-methyladenosine-3'-phosphorothioate
  modified_base 2: mod_base = OTHER; note = 2'-deoxy-2'-fluorouridine-3'-phosphorothioate
  modified_base 3: mod_base = OTHER; note = 2'-O-methyluridine-3'-phosphate
  modified_base 4: mod_base = OTHER; note = 2'-O-methyladenosine-3'-phosphate
  modified_base 5: mod_base = OTHER; note = 2'-O-methyluridine-3'-phosphate
  modified_base 6: mod_base = OTHER; note = 2'-deoxy-2'-fluorouridine-3'-phosphate
  modified_base 7: mod_base = OTHER; note = 2'-O-methyluridine-3'-phosphate
  modified_base 8: mod_base = OTHER; note = 2'-deoxy-2'-fluorocytidine-3'-phosphate
  modified_base 9: mod_base = OTHER; note = 2'-deoxy-2'-fluorouridine-3'-phosphate
  modified_base 10: mod_base = OTHER; note = 2'-O-methyladenosine-3'-phosphate
  modified_base 11: mod_base = OTHER; note = 2'-O-methyladenosine-3'-phosphate
  modified_base 12: mod_base = OTHER; note = 2'-O-methyladenosine-3'-phosphate
  modified_base 13: mod_base = OTHER; note = 2'-O-methyladenosine-3'-phosphate
  modified_base 14: mod_base = OTHER; note = 2'-deoxy-2'-fluorouridine-3'-phosphate
  modified_base 15: mod_base = OTHER; note = 2'-O-methylguanosine-3'-phosphate
  modified_base 16: mod_base = OTHER; note = 2'-deoxy-2'-fluorocytidine-3'-phosphate
  modified_base 17: mod_base = OTHER; note = 2'-O-methyladenosine-3'-phosphate
  modified_base 18: mod_base = OTHER; note = 2'-O-methylguanosine-3'-phosphate
  modified_base 19: mod_base = OTHER; note = 2'-O-methyladenosine-3'-phosphate
  modified_base 20: mod_base = OTHER; note = 2'-O-methyluridine-3'-phosphate
  modified_base 21: mod_base = OTHER; note = 2'-O-methyluridine-3'-phosphorothioate
  modified_base 22: mod_base = OTHER; note = 2'-O-methylguanosine-3'-phosphorothioate
  modified_base 23: mod_base = OTHER; note = 2'-O-methylcytidine
attatttctaaaatgcagattgc

SEQ ID NO: 422 - RNA, 23 nt, synthetic construct
  source 1..23: mol_type = other RNA
  modified_base 1: mod_base = OTHER; note = 2'-O-methyladenosine-3'-phosphorothioate
  modified_base 2: mod_base = OTHER; note = 2'-deoxy-2'-fluorocytidine-3'-phosphorothioate
  modified_base 3: mod_base = OTHER; note = 2'-O-methyluridine-3'-phosphate
  modified_base 4: mod_base = OTHER; note = 2'-O-methylguanosine-3'-phosphate
  modified_base 5: mod_base = OTHER; note = 2'-O-methyluridine-3'-phosphate
  modified_base 6: mod_base = OTHER; note = 2'-deoxy-2'-fluoroguanosine-3'-phosphate
  modified_base 7: mod_base = OTHER; note = 2'-O-methyladenosine-3'-phosphate
  modified_base 8: mod_base = OTHER; note = 2'-deoxy-2'-fluoroguanosine-3'-phosphate
  modified_base 9: mod_base = OTHER; note = 2'-deoxy-2'-fluoroguanosine-3'-phosphate
  modified_base 10: mod_base = OTHER; note = 2'-O-methyladenosine-3'-phosphate
  modified_base 11: mod_base = OTHER; note = 2'-O-methyluridine-3'-phosphate
  modified_base 12: mod_base = OTHER; note = 2'-O-methylguanosine-3'-phosphate
  modified_base 13: mod_base = OTHER; note = 2'-O-methylcytidine-3'-phosphate
  modified_base 14: mod_base = OTHER; note = 2'-deoxy-2'-fluorouridine-3'-phosphate
  modified_base 15: mod_base = OTHER; note = 2'-O-methyluridine-3'-phosphate
  modified_base 16: mod_base = OTHER; note = 2'-deoxy-2'-fluoroadenosine-3'-phosphate
  modified_base 17: mod_base = OTHER; note = 2'-O-methyluridine-3'-phosphate
  modified_base 18: mod_base = OTHER; note = 2'-O-methyluridine-3'-phosphate
  modified_base 19: mod_base = OTHER; note = 2'-O-methyluridine-3'-phosphate
  modified_base 20: mod_base = OTHER; note = 2'-O-methylcytidine-3'-phosphate
  modified_base 21: mod_base = OTHER; note = 2'-O-methyluridine-3'-phosphorothioate
  modified_base 22: mod_base = OTHER; note = 2'-O-methyladenosine-3'-phosphorothioate
  modified_base 23: mod_base = OTHER; note = 2'-O-methyladenosine
actgtgaggatgcttatttctaa

SEQ ID NO: 423 - RNA, 23 nt, synthetic construct
  source 1..23: mol_type = other RNA
  modified_base 1: mod_base = OTHER; note = 2'-O-methyladenosine-3'-phosphorothioate
  modified_base 2: mod_base = OTHER; note = 2'-deoxy-2'-fluoroadenosine-3'-phosphorothioate
  modified_base 3: mod_base = OTHER; note = 2'-O-methyluridine-3'-phosphate
  modified_base 4: mod_base = OTHER; note = 2'-O-methyladenosine-3'-phosphate
  modified_base 5: mod_base = OTHER; note = 2'-O-methyladenosine-3'-phosphate
  modified_base 6: mod_base = OTHER; note = 2'-deoxy-2'-fluorocytidine-3'-phosphate
  modified_base 7: mod_base = OTHER; note = 2'-O-methyluridine-3'-phosphate
  modified_base 8: mod_base = OTHER; note = 2'-deoxy-2'-fluoroguanosine-3'-phosphate
  modified_base 9: mod_base = OTHER; note = 2'-deoxy-2'-fluoroguanosine-3'-phosphate
  modified_base 10: mod_base = OTHER; note = 2'-O-methyluridine-3'-phosphate
  modified_base 11: mod_base = OTHER; note = 2'-O-methylcytidine-3'-phosphate
  modified_base 12: mod_base = OTHER; note = 2'-O-methylguanosine-3'-phosphate
  modified_base 13: mod_base = OTHER; note = 2'-O-methyluridine-3'-phosphate
  modified_base 14: mod_base = OTHER; note = 2'-deoxy-2'-fluoroguanosine-3'-phosphate
  modified_base 15: mod_base = OTHER; note = 2'-O-methyluridine-3'-phosphate
  modified_base 16: mod_base = OTHER; note = 2'-deoxy-2'-fluoroadenosine-3'-phosphate
  modified_base 17: mod_base = OTHER; note = 2'-O-methylcytidine-3'-phosphate
  modified_base 18: mod_base = OTHER; note = 2'-O-methyluridine-3'-phosphate
  modified_base 19: mod_base = OTHER; note = 2'-O-methylguanosine-3'-phosphate
  modified_base 20: mod_base = OTHER; note = 2'-O-methyluridine-3'-phosphate
  modified_base 21: mod_base = OTHER; note = 2'-O-methylguanosine-3'-phosphorothioate
  modified_base 22: mod_base = OTHER; note = 2'-O-methylcytidine-3'-phosphorothioate
  modified_base 23: mod_base = OTHER; note = 2'-O-methyluridine
aataactggtcgtgtactgtgct

SEQ ID NO: 424 - RNA, 23 nt, synthetic construct
  source 1..23: mol_type = other RNA
  modified_base 1: mod_base = OTHER; note = 2'-O-methyladenosine-3'-phosphorothioate
  modified_base 2: mod_base = OTHER; note = 2'-deoxy-2'-fluoroadenosine-3'-phosphorothioate
  modified_base 3: mod_base = OTHER; note = 2'-O-methylcytidine-3'-phosphate
  modified_base 4: mod_base = OTHER; note = 2'-O-methyluridine-3'-phosphate
  modified_base 5: mod_base = OTHER; note = 2'-O-methylguanosine-3'-phosphate
  modified_base 6: mod_base = OTHER; note = 2'-deoxy-2'-fluorocytidine-3'-phosphate
  modified_base 7: mod_base = OTHER; note = 2'-O-methyluridine-3'-phosphate
  modified_base 8: mod_base = OTHER; note = 2'-deoxy-2'-fluorouridine-3'-phosphate
  modified_base 9: mod_base = OTHER; note = 2'-deoxy-2'-fluorouridine-3'-phosphate
  modified_base 10: mod_base = OTHER; note = 2'-O-methylcytidine-3'-phosphate
  modified_base 11: mod_base = OTHER; note = 2'-O-methyluridine-3'-phosphate
  modified_base 12: mod_base = OTHER; note = 2'-O-methylguanosine-3'-phosphate
  modified_base 13: mod_base = OTHER; note = 2'-O-methyluridine-3'-phosphate
  modified_base 14: mod_base = OTHER; note = 2'-deoxy-2'-fluorouridine-3'-phosphate
  modified_base 15: mod_base = OTHER; note = 2'-O-methyladenosine-3'-phosphate
  modified_base 16: mod_base = OTHER; note = 2'-deoxy-2'-fluoroguanosine-3'-phosphate
  modified_base 17: mod_base = OTHER; note = 2'-O-methylcytidine-3'-phosphate
  modified_base 18: mod_base = OTHER; note = 2'-O-methyluridine-3'-phosphate
  modified_base 19: mod_base = OTHER; note = 2'-O-methylcytidine-3'-phosphate
  modified_base 20: mod_base = OTHER; note = 2'-O-methyluridine-3'-phosphate
  modified_base 21: mod_base = OTHER; note = 2'-O-methylguanosine-3'-phosphorothioate
  modified_base 22: mod_base = OTHER; note = 2'-O-methylguanosine-3'-phosphorothioate
  modified_base 23: mod_base = OTHER; note = 2'-O-methylguanosine
aactgctttctgttagctctggg

SEQ ID NO: 425 - RNA, 23 nt, synthetic construct
  source 1..23: mol_type = other RNA
  modified_base 1: mod_base = OTHER; note = 2'-O-methyladenosine-3'-phosphorothioate
  modified_base 2: mod_base = OTHER; note = 2'-deoxy-2'-fluorouridine-3'-phosphorothioate
  modified_base 3: mod_base = OTHER; note = 2'-O-methylguanosine-3'-phosphate
  modified_base 4: mod_base = OTHER; note = 2'-O-methyluridine-3'-phosphate
  modified_base 5: mod_base = OTHER; note = 2'-O-methylguanosine-3'-phosphate
  modified_base 6: mod_base = OTHER; note = 2'-deoxy-2'-fluorouridine-3'-phosphate
  modified_base 7: mod_base = OTHER; note = 2'-O-methylguanosine-3'-phosphate
  modified_base 8: mod_base = OTHER; note = 2'-deoxy-2'-fluoroadenosine-3'-phosphate
  modified_base 9: mod_base = OTHER; note = 2'-deoxy-2'-fluorouridine-3'-phosphate
  modified_base 10: mod_base = OTHER; note = 2'-O-methylguanosine-3'-phosphate
  modified_base 11: mod_base = OTHER; note = 2'-O-methylcytidine-3'-phosphate
  modified_base 12: mod_base = OTHER; note = 2'-O-methyladenosine-3'-phosphate
  modified_base 13: mod_base = OTHER; note = 2'-O-methylguanosine-3'-phosphate
  modified_base 14: mod_base = OTHER; note = 2'-deoxy-2'-fluoroadenosine-3'-phosphate
  modified_base 15: mod_base = OTHER; note = 2'-O-methylguanosine-3'-phosphate
  modified_base 16: mod_base = OTHER; note = 2'-deoxy-2'-fluorocytidine-3'-phosphate
  modified_base 17: mod_base = OTHER; note = 2'-O-methylcytidine-3'-phosphate
  modified_base 18: mod_base = OTHER; note = 2'-O-methyladenosine-3'-phosphate
  modified_base 19: mod_base = OTHER; note = 2'-O-methylcytidine-3'-phosphate
  modified_base 20: mod_base = OTHER; note = 2'-O-methyluridine-3'-phosphate
  modified_base 21: mod_base = OTHER; note = 2'-O-methylguanosine-3'-phosphorothioate
  modified_base 22: mod_base = OTHER; note = 2'-O-methylcytidine-3'-phosphorothioate
  modified_base 23: mod_base = OTHER; note = 2'-O-methyluridine
atgtgtgatgcagagccactgct

SEQ ID NO: 426 - RNA, 23 nt, synthetic construct
  source 1..23: mol_type = other RNA
  modified_base 1: mod_base = OTHER; note = 2'-O-methyladenosine-3'-phosphorothioate
  modified_base 2: mod_base = OTHER; note = 2'-deoxy-2'-fluorouridine-3'-phosphorothioate
  modified_base 3: mod_base = OTHER; note = 2'-O-methyluridine-3'-phosphate
  modified_base 4: mod_base = OTHER; note = 2'-O-methylcytidine-3'-phosphate
  modified_base 5: mod_base = OTHER; note = 2'-O-methyluridine-3'-phosphate
  modified_base 6: mod_base = OTHER; note = 2'-deoxy-2'-fluoroguanosine-3'-phosphate
  modified_base 7: mod_base = OTHER; note = 2'-O-methylcytidine-3'-phosphate
  modified_base 8: mod_base = OTHER; note = 2'-deoxy-2'-fluoroadenosine-3'-phosphate
  modified_base 9: mod_base = OTHER; note = 2'-deoxy-2'-fluoroguanosine-3'-phosphate
  modified_base 10: mod_base = OTHER; note = 2'-O-methyluridine-3'-phosphate
  modified_base 11: mod_base = OTHER; note = 2'-O-methylcytidine-3'-phosphate
  modified_base 12: mod_base = OTHER; note = 2'-O-methyluridine-3'-phosphate
  modified_base 13: mod_base = OTHER; note = 2'-O-methyladenosine-3'-phosphate
  modified_base 14: mod_base = OTHER; note = 2'-deoxy-2'-fluorouridine-3'-phosphate
  modified_base 15: mod_base = OTHER; note = 2'-O-methylguanosine-3'-phosphate
  modified_base 16: mod_base = OTHER; note = 2'-deoxy-2'-fluorouridine-3'-phosphate
  modified_base 17: mod_base = OTHER; note = 2'-O-methylguanosine-3'-phosphate
  modified_base 18: mod_base = OTHER; note = 2'-O-methyluridine-3'-phosphate
  modified_base 19: mod_base = OTHER; note = 2'-O-methylguanosine-3'-phosphate
  modified_base 20: mod_base = OTHER; note = 2'-O-methyladenosine-3'-phosphate
  modified_base 21: mod_base = OTHER; note = 2'-O-methyluridine-3'-phosphorothioate
  modified_base 22: mod_base = OTHER; note = 2'-O-methylguanosine-3'-phosphorothioate
  modified_base 23: mod_base = OTHER; note = 2'-O-methylcytidine
attctgcagtctatgtgtgatgc

SEQ ID NO: 427 - RNA, 23 nt, synthetic construct
  source 1..23: mol_type = other RNA
  modified_base 1: mod_base = OTHER; note = 2'-O-methyladenosine-3'-phosphorothioate
  modified_base 2: mod_base = OTHER; note = 2'-deoxy-2'-fluoroadenosine-3'-phosphorothioate
  modified_base 3: mod_base = OTHER; note = 2'-O-methyluridine-3'-phosphate
  modified_base 4: mod_base = OTHER; note = 2'-O-methylcytidine-3'-phosphate
  modified_base 5: mod_base = OTHER; note = 2'-O-methylguanosine-3'-phosphate
  modified_base 6: mod_base = OTHER; note = 2'-deoxy-2'-fluorocytidine-3'-phosphate
  modified_base 7: mod_base = OTHER; note = 2'-O-methyladenosine-3'-phosphate
  modified_base 8: mod_base = OTHER; note = 2'-deoxy-2'-fluorouridine-3'-phosphate
  modified_base 9: mod_base = OTHER; note = 2'-deoxy-2'-fluorouridine-3'-phosphate
  modified_base 10: mod_base = OTHER; note = 2'-O-methylguanosine-3'-phosphate
  modified_base 11: mod_base = OTHER; note = 2'-O-methyluridine-3'-phosphate
  modified_base 12: mod_base = OTHER; note = 2'-O-methylguanosine-3'-phosphate
  modified_base 13: mod_base = OTHER; note = 2'-O-methyladenosine-3'-phosphate
  modified_base 14: mod_base = OTHER; note = 2'-deoxy-2'-fluorocytidine-3'-phosphate
  modified_base 15: mod_base = OTHER; note = 2'-O-methylcytidine-3'-phosphate
  modified_base 16: mod_base = OTHER; note = 2'-deoxy-2'-fluoroadenosine-3'-phosphate
  modified_base 17: mod_base = OTHER; note = 2'-O-methyluridine-3'-phosphate
  modified_base 18: mod_base = OTHER; note = 2'-O-methyluridine-3'-phosphate
  modified_base 19: mod_base = OTHER; note = 2'-O-methylcytidine-3'-phosphate
  modified_base 20: mod_base = OTHER; note = 2'-O-methyladenosine-3'-phosphate
  modified_base 21: mod_base = OTHER; note = 2'-O-methylcytidine-3'-phosphorothioate
  modified_base 22: mod_base = OTHER; note = 2'-O-methyluridine-3'-phosphorothioate
  modified_base 23: mod_base = OTHER; note = 2'-O-methylcytidine
aatcgcattgtgaccattcactc

SEQ ID NO: 428 - RNA, 23 nt, synthetic construct
  source 1..23: mol_type = other RNA
  modified_base 1: mod_base = OTHER; note = 2'-O-methyladenosine-3'-phosphorothioate
  modified_base 2: mod_base = OTHER; note = 2'-deoxy-2'-fluorouridine-3'-phosphorothioate
  modified_base 3: mod_base = OTHER; note = 2'-O-methylguanosine-3'-phosphate
  modified_base 4: mod_base = OTHER; note = 2'-O-methyluridine-3'-phosphate
  modified_base 5: mod_base = OTHER; note = 2'-O-methylcytidine-3'-phosphate
  modified_base 6: mod_base = OTHER; note = 2'-deoxy-2'-fluorouridine-3'-phosphate
  modified_base 7: mod_base = OTHER; note = 2'-O-methylguanosine-3'-phosphate
  modified_base 8: mod_base = OTHER; note = 2'-deoxy-2'-fluoroadenosine-3'-phosphate
  modified_base 9: mod_base = OTHER; note = 2'-deoxy-2'-fluoroguanosine-3'-phosphate
  modified_base 10: mod_base = OTHER; note = 2'-O-methyladenosine-3'-phosphate
  modified_base 11: mod_base = OTHER; note = 2'-O-methylcytidine-3'-phosphate
  modified_base 12: mod_base = OTHER; note = 2'-O-methyladenosine-3'-phosphate
  modified_base 13: mod_base = OTHER; note = 2'-O-methyladenosine-3'-phosphate
  modified_base 14: mod_base = OTHER; note = 2'-deoxy-2'-fluoroguanosine-3'-phosphate
  modified_base 15: mod_base = OTHER; note = 2'-O-methylguanosine-3'-phosphate
  modified_base 16: mod_base = OTHER; note = 2'-deoxy-2'-fluoroadenosine-3'-phosphate
  modified_base 17: mod_base = OTHER; note = 2'-O-methyluridine-3'-phosphate
  modified_base 18: mod_base = OTHER; note = 2'-O-methylcytidine-3'-phosphate
  modified_base 19: mod_base = OTHER; note = 2'-O-methylguanosine-3'-phosphate
  modified_base 20: mod_base = OTHER; note = 2'-O-methylcytidine-3'-phosphate
  modified_base 21: mod_base = OTHER; note = 2'-O-methyladenosine-3'-phosphorothioate
  modified_base 22: mod_base = OTHER; note = 2'-O-methyluridine-3'-phosphorothioate
  modified_base 23: mod_base = OTHER; note = 2'-O-methyluridine
atgtctgagacaaggatcgcatt

SEQ ID NO: 429 - RNA, 23 nt, synthetic construct
  source 1..23: mol_type = other RNA
  modified_base 1: mod_base = OTHER; note = 2'-O-methyladenosine-3'-phosphorothioate
  modified_base 2: mod_base = OTHER; note = 2'-deoxy-2'-fluorouridine-3'-phosphorothioate
  modified_base 3: mod_base = OTHER; note = 2'-O-methylguanosine-3'-phosphate
  modified_base 4: mod_base = OTHER; note = 2'-O-methyladenosine-3'-phosphate
  modified_base 5: mod_base = OTHER; note = 2'-O-methyladenosine-3'-phosphate
  modified_base 6: mod_base = OTHER; note = 2'-deoxy-2'-fluorocytidine-3'-phosphate
  modified_base 7: mod_base = OTHER; note = 2'-O-methylguanosine-3'-phosphate
  modified_base 8: mod_base = OTHER; note = 2'-deoxy-2'-fluoroadenosine-3'-phosphate
  modified_base 9: mod_base = OTHER; note = 2'-deoxy-2'-fluoroadenosine-3'-phosphate
  modified_base 10: mod_base = OTHER; note = 2'-O-methyladenosine-3'-phosphate
  modified_base 11: mod_base = OTHER; note = 2'-O-methylcytidine-3'-phosphate
  modified_base 12: mod_base = OTHER; note = 2'-O-methyladenosine-3'-phosphate
  modified_base 13: mod_base = OTHER; note = 2'-O-methyluridine-3'-phosphate
  modified_base 14: mod_base = OTHER; note = 2'-deoxy-2'-fluorouridine-3'-phosphate
  modified_base 15: mod_base = OTHER; note = 2'-O-methyluridine-3'-phosphate
  modified_base 16: mod_base = OTHER; note = 2'-deoxy-2'-fluoroguanosine-3'-phosphate
  modified_base 17: mod_base = OTHER; note = 2'-O-methyluridine-3'-phosphate
  modified_base 18: mod_base = OTHER; note = 2'-O-methylcytidine-3'-phosphate
  modified_base 19: mod_base = OTHER; note = 2'-O-methyluridine-3'-phosphate
  modified_base 20: mod_base = OTHER; note = 2'-O-methylguanosine-3'-phosphate
  modified_base 21: mod_base = OTHER; note = 2'-O-methyladenosine-3'-phosphorothioate
  modified_base 22: mod_base = OTHER; note = 2'-O-methylguanosine-3'-phosphorothioate
  modified_base 23: mod_base = OTHER; note = 2'-O-methyladenosine
atgaacgaaacatttgtctgaga

SEQ ID NO: 430 - RNA, 23 nt, synthetic construct
  source 1..23: mol_type = other RNA
  modified_base 1: mod_base = OTHER; note = 2'-O-methyladenosine-3'-phosphorothioate
  modified_base 2: mod_base = OTHER; note = 2'-deoxy-2'-fluoroadenosine-3'-phosphorothioate
  modified_base 3: mod_base = OTHER; note = 2'-O-methyladenosine-3'-phosphate
  modified_base 4: mod_base = OTHER; note = 2'-O-methyladenosine-3'-phosphate
  modified_base 5: mod_base = OTHER; note = 2'-O-methylguanosine-3'-phosphate
  modified_base 6: mod_base = OTHER; note = 2'-deoxy-2'-fluoroadenosine-3'-phosphate
  modified_base 7: mod_base = OTHER; note = 2'-O-methylcytidine-3'-phosphate
  modified_base 8: mod_base = OTHER; note = 2'-deoxy-2'-fluorocytidine-3'-phosphate
  modified_base 9: mod_base = OTHER; note = 2'-deoxy-2'-fluorouridine-3'-phosphate
  modified_base 10: mod_base = OTHER; note = 2'-O-methylcytidine-3'-phosphate
  modified_base 11: mod_base = OTHER; note = 2'-O-methyladenosine-3'-phosphate
  modified_base 12: mod_base = OTHER; note = 2'-O-methyladenosine-3'-phosphate
  modified_base 13: mod_base = OTHER; note = 2'-O-methyluridine-3'-phosphate
  modified_base 14: mod_base = OTHER; note = 2'-deoxy-2'-fluoroguanosine-3'-phosphate
  modified_base 15: mod_base = OTHER; note = 2'-O-methylcytidine-3'-phosphate
  modified_base 16: mod_base = OTHER; note = 2'-deoxy-2'-fluorouridine-3'-phosphate
  modified_base 17: mod_base = OTHER; note = 2'-O-methyluridine-3'-phosphate
  modified_base 18: mod_base = OTHER; note = 2'-O-methylcytidine-3'-phosphate
  modified_base 19: mod_base = OTHER; note = 2'-O-methyluridine-3'-phosphate
  modified_base 20: mod_base = OTHER; note = 2'-O-methyluridine-3'-phosphate
  modified_base 21: mod_base = OTHER; note = 2'-O-methylguanosine-3'-phosphorothioate
  modified_base 22: mod_base = OTHER; note = 2'-O-methyladenosine-3'-phosphorothioate
  modified_base 23: mod_base = OTHER; note = 2'-O-methyladenosine
aaaagacctcaatgcttcttgaa

SEQ ID NO: 431 - RNA, 23 nt, synthetic construct
  source 1..23: mol_type = other RNA
  modified_base 1: mod_base = OTHER; note = 2'-O-methyladenosine-3'-phosphorothioate
  modified_base 2: mod_base = OTHER; note = 2'-deoxy-2'-fluorouridine-3'-phosphorothioate
  modified_base 3: mod_base = OTHER; note = 2'-O-methyluridine-3'-phosphate
  modified_base 4: mod_base = OTHER; note = 2'-O-methyluridine-3'-phosphate
  modified_base 5: mod_base = OTHER; note = 2'-O-methyluridine-3'-phosphate
  modified_base 6: mod_base = OTHER; note = 2'-deoxy-2'-fluorocytidine-3'-phosphate
  modified_base 7: mod_base = OTHER; note = 2'-O-methylcytidine-3'-phosphate
  modified_base 8: mod_base = OTHER; note = 2'-deoxy-2'-fluorocytidine-3'-phosphate
  modified_base 9: mod_base = OTHER; note = 2'-deoxy-2'-fluoroadenosine-3'-phosphate
  modified_base 10: mod_base = OTHER; note = 2'-O-methyluridine-3'-phosphate
  modified_base 11: mod_base = OTHER; note = 2'-O-methyluridine-3'-phosphate
  modified_base 12: mod_base = OTHER; note = 2'-O-methyladenosine-3'-phosphate
  modified_base 13: mod_base = OTHER; note = 2'-O-methyladenosine-3'-phosphate
  modified_base 14: mod_base = OTHER; note = 2'-deoxy-2'-fluoroadenosine-3'-phosphate
  modified_base 15: mod_base = OTHER; note = 2'-O-methyluridine-3'-phosphate
  modified_base 16: mod_base = OTHER; note = 2'-deoxy-2'-fluorouridine-3'-phosphate
  modified_base 17: mod_base = OTHER; note = 2'-O-methylguanosine-3'-phosphate
  modified_base 18: mod_base = OTHER; note = 2'-O-methyluridine-3'-phosphate
  modified_base 19: mod_base = OTHER; note = 2'-O-methylcytidine-3'-phosphate
  modified_base 20: mod_base = OTHER; note = 2'-O-methylcytidine-3'-phosphate
  modified_base 21: mod_base = OTHER; note = 2'-O-methyladenosine-3'-phosphorothioate
  modified_base 22: mod_base = OTHER; note = 2'-O-methyladenosine-3'-phosphorothioate
  modified_base 23: mod_base = OTHER; note = 2'-O-methyladenosine
attttcccattaaattgtccaaa

SEQ ID NO: 432 - RNA, 23 nt, synthetic construct
  source 1..23: mol_type = other RNA
  modified_base 1: mod_base = OTHER; note = 2'-O-methyladenosine-3'-phosphorothioate
  modified_base 2: mod_base = OTHER; note = 2'-deoxy-2'-fluoroadenosine-3'-phosphorothioate
  modified_base 3: mod_base = OTHER; note = 2'-O-methylcytidine-3'-phosphate
  modified_base 4: mod_base = OTHER; note = 2'-O-methyladenosine-3'-phosphate
  modified_base 5: mod_base = OTHER; note = 2'-O-methylcytidine-3'-phosphate
  modified_base 6: mod_base = OTHER; note = 2'-deoxy-2'-fluoroadenosine-3'-phosphate
  modified_base 7: mod_base = OTHER; note = 2'-O-methylcytidine-3'-phosphate
  modified_base 8: mod_base = OTHER; note = 2'-deoxy-2'-fluorouridine-3'-phosphate
  modified_base 9: mod_base = OTHER; note = 2'-deoxy-2'-fluoroguanosine-3'-phosphate
  modified_base 10: mod_base = OTHER; note = 2'-O-methyluridine-3'-phosphate
  modified_base 11: mod_base = OTHER; note = 2'-O-methylcytidine-3'-phosphate
  modified_base 12: mod_base = OTHER; note = 2'-O-methylguanosine-3'-phosphate
  modified_base 13: mod_base = OTHER; note = 2'-O-methyluridine-3'-phosphate
  modified_base 14: mod_base = OTHER; note = 2'-deoxy-2'-fluorocytidine-3'-phosphate
  modified_base 15: mod_base = OTHER; note = 2'-O-methyluridine-3'-phosphate
  modified_base 16: mod_base = OTHER; note = 2'-deoxy-2'-fluoroguanosine-3'-phosphate
  modified_base 17: mod_base = OTHER; note = 2'-O-methyluridine-3'-phosphate
  modified_base 18: mod_base = OTHER; note = 2'-O-methylcytidine-3'-phosphate
  modified_base 19: mod_base = OTHER; note = 2'-O-methyluridine-3'-phosphate
  modified_base 20: mod_base = OTHER; note = 2'-O-methylcytidine-3'-phosphate
  modified_base 21: mod_base = OTHER; note = 2'-O-methylcytidine-3'-phosphorothioate
  modified_base 22: mod_base = OTHER; note = 2'-O-methylcytidine-3'-phosphorothioate
  modified_base 23: mod_base = OTHER; note = 2'-O-methyladenosine
aacacactgtcgtctgtctccca

SEQ ID NO: 433 - RNA, 23 nt, synthetic construct
  source 1..23: mol_type = other RNA
  modified_base 1: mod_base = OTHER; note = 2'-O-methyladenosine-3'-phosphorothioate
  modified_base 2: mod_base = OTHER; note = 2'-deoxy-2'-fluoroadenosine-3'-phosphorothioate
  modified_base 3: mod_base = OTHER; note = 2'-O-methyluridine-3'-phosphate
  modified_base 4: mod_base = OTHER; note = 2'-O-methyluridine-3'-phosphate
  modified_base 5: mod_base = OTHER; note = 2'-O-methylguanosine-3'-phosphate
  modified_base 6: mod_base = OTHER; note = 2'-deoxy-2'-fluoroadenosine-3'-phosphate
  modified_base 7: mod_base = OTHER; note = 2'-O-methyladenosine-3'-phosphate
  modified_base 8: mod_base = OTHER; note = 2'-deoxy-2'-fluoroadenosine-3'-phosphate
  modified_base 9: mod_base = OTHER; note = 2'-deoxy-2'-fluoroguanosine-3'-phosphate
  modified_base 10: mod_base = OTHER; note = 2'-O-methyluridine-3'-phosphate
  modified_base 11: mod_base = OTHER; note = 2'-O-methylcytidine-3'-phosphate
  modified_base 12: mod_base = OTHER; note = 2'-O-methyladenosine-3'-phosphate
  modified_base 13: mod_base = OTHER; note = 2'-O-methyluridine-3'-phosphate
  modified_base 14: mod_base = OTHER; note = 2'-deoxy-2'-fluorouridine-3'-phosphate
  modified_base 15: mod_base = OTHER; note = 2'-O-methyluridine-3'-phosphate
  modified_base 16: mod_base = OTHER; note = 2'-deoxy-2'-fluorocytidine-3'-phosphate
  modified_base 17: mod_base = OTHER; note = 2'-O-methylcytidine-3'-phosphate
  modified_base 18: mod_base = OTHER; note = 2'-O-methylguanosine-3'-phosphate
  modified_base 19: mod_base = OTHER; note = 2'-O-methylcytidine-3'-phosphate
  modified_base 20: mod_base = OTHER; note = 2'-O-methyladenosine-3'-phosphate
  modified_base 21: mod_base = OTHER; note = 2'-O-methylguanosine-3'-phosphorothioate
  modified_base 22: mod_base = OTHER; note = 2'-O-methyluridine-3'-phosphorothioate
  modified_base 23: mod_base = OTHER; note = 2'-O-methylcytidine
aattgaaagtcatttccgcagtc

SEQ ID NO: 434 - RNA, 23 nt, synthetic construct
  source 1..23: mol_type = other RNA
  modified_base 1: mod_base = OTHER; note = 2'-O-methyladenosine-3'-phosphorothioate
  modified_base 2: mod_base = OTHER; note = 2'-deoxy-2'-fluorouridine-3'-phosphorothioate
  modified_base 3: mod_base = OTHER; note = 2'-O-methylguanosine-3'-phosphate
  modified_base 4: mod_base = OTHER; note = 2'-O-methylcytidine-3'-phosphate
  modified_base 5: mod_base = OTHER; note = 2'-O-methylcytidine-3'-phosphate
  modified_base 6: mod_base = OTHER; note = 2'-deoxy-2'-fluorouridine-3'-phosphate
  modified_base 7: mod_base = OTHER; note = 2'-O-methylguanosine-3'-phosphate
  modified_base 8: mod_base = OTHER; note = 2'-deoxy-2'-fluorouridine-3'-phosphate
  modified_base 9: mod_base = OTHER; note = 2'-deoxy-2'-fluoroadenosine-3'-phosphate
  modified_base 10: mod_base = OTHER; note = 2'-O-methylcytidine-3'-phosphate
  modified_base 11: mod_base = OTHER; note = 2'-O-methyluridine-3'-phosphate
  modified_base 12: mod_base = OTHER; note = 2'-O-methylguanosine-3'-phosphate
  modified_base 13: mod_base = OTHER; note = 2'-O-methylcytidine-3'-phosphate
  modified_base 14: mod_base = OTHER; note = 2'-deoxy-2'-fluoroadenosine-3'-phosphate
  modified_base 15: mod_base = OTHER; note = 2'-O-methyluridine-3'-phosphate
  modified_base 16: mod_base = OTHER; note = 2'-deoxy-2'-fluorouridine-3'-phosphate
  modified_base 17: mod_base = OTHER; note = 2'-O-methylguanosine-3'-phosphate
  modified_base 18: mod_base = OTHER; note = 2'-O-methyladenosine-3'-phosphate
  modified_base 19: mod_base = OTHER; note = 2'-O-methyladenosine-3'-phosphate
  modified_base 20: mod_base = OTHER; note = 2'-O-methyladenosine-3'-phosphate
  modified_base 21: mod_base = OTHER; note = 2'-O-methylguanosine-3'-phosphorothioate
  modified_base 22: mod_base = OTHER; note = 2'-O-methyluridine-3'-phosphorothioate
  modified_base 23: mod_base = OTHER; note = 2'-O-methylcytidine
atgcctgtactgcattgaaagtc

SEQ ID NO: 435 - RNA, 23 nt, synthetic construct
  source 1..23: mol_type = other RNA
  modified_base 1: mod_base = OTHER; note = 2'-O-methyladenosine-3'-phosphorothioate
  modified_base 2: mod_base = OTHER; note = 2'-deoxy-2'-fluoroadenosine-3'-phosphorothioate
  modified_base 3: mod_base = OTHER; note = 2'-O-methyladenosine-3'-phosphate
  modified_base 4: mod_base = OTHER; note = 2'-O-methylguanosine-3'-phosphate
  modified_base 5: mod_base = OTHER; note = 2'-O-methyluridine-3'-phosphate
  modified_base 6: mod_base = OTHER; note = 2'-deoxy-2'-fluorocytidine-3'-phosphate
  modified_base 7: mod_base = OTHER; note = 2'-O-methylguanosine-3'-phosphate
  modified_base 8: mod_base = OTHER; note = 2'-deoxy-2'-fluorocytidine-3'-phosphate
  modified_base 9: mod_base = OTHER; note = 2'-deoxy-2'-fluoroadenosine-3'-phosphate
  modified_base 10: mod_base = OTHER; note = 2'-O-methyluridine-3'-phosphate
  modified_base 11: mod_base = OTHER; note = 2'-O-methylcytidine-3'-phosphate
  modified_base 12: mod_base = OTHER; note = 2'-O-methyluridine-3'-phosphate
  modified_base 13: mod_base = OTHER; note = 2'-O-methyluridine-3'-phosphate
  modified_base 14: mod_base = OTHER; note = 2'-deoxy-2'-fluorouridine-3'-phosphate
  modified_base 15: mod_base = OTHER; note = 2'-O-methyladenosine-3'-phosphate
  modified_base 16: mod_base = OTHER; note = 2'-deoxy-2'-fluorouridine-3'-phosphate
  modified_base 17: mod_base = OTHER; note = 2'-O-methylguanosine-3'-phosphate
  modified_base 18: mod_base = OTHER; note = 2'-O-methylcytidine-3'-phosphate
  modified_base 19: mod_base = OTHER; note = 2'-O-methyladenosine-3'-phosphate
  modified_base 20: mod_base = OTHER; note = 2'-O-methyluridine-3'-phosphate
  modified_base 21: mod_base = OTHER; note = 2'-O-methylcytidine-3'-phosphorothioate
  modified_base 22: mod_base = OTHER; note = 2'-O-methyluridine-3'-phosphorothioate
  modified_base 23: mod_base = OTHER; note = 2'-O-methylguanosine
aaagtcgcatctttatgcatctg

SEQ ID NO: 436 - RNA, 23 nt, synthetic construct
  source 1..23: mol_type = other RNA
  modified_base 1: mod_base = OTHER; note = 2'-O-methyladenosine-3'-phosphorothioate
  modified_base 2: mod_base = OTHER; note = 2'-deoxy-2'-fluorocytidine-3'-phosphorothioate
  modified_base 3: mod_base = OTHER; note = 2'-O-methyladenosine-3'-phosphate
  modified_base 4: mod_base = OTHER; note = 2'-O-methylguanosine-3'-phosphate
  modified_base 5: mod_base = OTHER; note = 2'-O-methyluridine-3'-phosphate
  modified_base 6: mod_base = OTHER; note = 2'-deoxy-2'-fluorocytidine-3'-phosphate
  modified_base 7: mod_base = OTHER; note = 2'-O-methyladenosine-3'-phosphate
  modified_base 8: mod_base = OTHER; note = 2'-deoxy-2'-fluorouridine-3'-phosphate
  modified_base 9: mod_base = OTHER; note = 2'-deoxy-2'-fluorouridine-3'-phosphate
  modified_base 10: mod_base = OTHER; note = 2'-O-methylguanosine-3'-phosphate
  modified_base 11: mod_base = OTHER; note = 2'-O-methyluridine-3'-phosphate
  modified_base 12: mod_base = OTHER; note = 2'-O-methylcytidine-3'-phosphate
  modified_base 13: mod_base = OTHER; note = 2'-O-methyladenosine-3'-phosphate
  modified_base 14: mod_base = OTHER; note = 2'-deoxy-2'-fluorocytidine-3'-phosphate
  modified_base 15: mod_base = OTHER; note = 2'-O-methylcytidine-3'-phosphate
  modified_base 16: mod_base = OTHER; note = 2'-deoxy-2'-fluoroadenosine-3'-phosphate
  modified_base 17: mod_base = OTHER; note = 2'-O-methyluridine-3'-phosphate
  modified_base 18: mod_base = OTHER; note = 2'-O-methyluridine-3'-phosphate
  modified_base 19: mod_base = OTHER; note = 2'-O-methyladenosine-3'-phosphate
  modified_base 20: mod_base = OTHER; note = 2'-O-methylcytidine-3'-phosphate
  modified_base 21: mod_base = OTHER; note = 2'-O-methyladenosine-3'-phosphorothioate
  modified_base 22: mod_base = OTHER; note = 2'-O-methylcytidine-3'-phosphorothioate
  modified_base 23: mod_base = OTHER; note = 2'-O-methylcytidine
acagtcattgtcaccattacacc

SEQ ID NO: 437 - RNA, 23 nt, synthetic construct
  source 1..23: mol_type = other RNA
  modified_base 1: mod_base = OTHER; note = 2'-O-methyladenosine-3'-phosphorothioate
  modified_base 2: mod_base = OTHER; note = 2'-deoxy-2'-fluoroadenosine-3'-phosphorothioate
  modified_base 3: mod_base = OTHER; note = 2'-O-methyluridine-3'-phosphate
  modified_base 4: mod_base = OTHER; note = 2'-O-methylcytidine-3'-phosphate
  modified_base 5: mod_base = OTHER; note = 2'-O-methylcytidine-3'-phosphate
  modified_base 6: mod_base = OTHER; note = 2'-deoxy-2'-fluorouridine-3'-phosphate
  modified_base 7: mod_base = OTHER; note = 2'-O-methylcytidine-3'-phosphate
  modified_base 8: mod_base = OTHER; note = 2'-deoxy-2'-fluoroadenosine-3'-phosphate
  modified_base 9: mod_base = OTHER; note = 2'-deoxy-2'-fluorouridine-3'-phosphate
  modified_base 10: mod_base = OTHER; note = 2'-O-methylcytidine-3'-phosphate
  modified_base 11: mod_base = OTHER; note = 2'-O-methyluridine-3'-phosphate
  modified_base 12: mod_base = OTHER; note = 2'-O-methylguanosine-3'-phosphate
  modified_base 13: mod_base = OTHER; note = 2'-O-methyladenosine-3'-phosphate
  modified_base 14: mod_base = OTHER; note = 2'-deoxy-2'-fluoroadenosine-3'-phosphate
  modified_base 15: mod_base = OTHER; note = 2'-O-methyladenosine-3'-phosphate
  modified_base 16: mod_base = OTHER; note = 2'-deoxy-2'-fluoroadenosine-3'-phosphate
  modified_base 17: mod_base = OTHER; note = 2'-O-methylguanosine-3'-phosphate
  modified_base 18: mod_base = OTHER; note = 2'-O-methyluridine-3'-phosphate
  modified_base 19: mod_base = OTHER; note = 2'-O-methylcytidine-3'-phosphate
  modified_base 20: mod_base = OTHER; note = 2'-O-methyluridine-3'-phosphate
  modified_base 21: mod_base = OTHER; note = 2'-O-methylcytidine-3'-phosphorothioate
  modified_base 22: mod_base = OTHER; note = 2'-O-methylcytidine-3'-phosphorothioate
  modified_base 23: mod_base = OTHER; note = 2'-O-methylguanosine
aatcctcatctgaaaagtctccg

SEQ ID NO: 438 - RNA, 23 nt, synthetic construct
  source 1..23: mol_type = other RNA
  modified_base 1: mod_base = OTHER; note = 2'-O-methyladenosine-3'-phosphorothioate
  modified_base 2: mod_base = OTHER; note = 2'-deoxy-2'-fluorouridine-3'-phosphorothioate
  modified_base 3: mod_base = OTHER; note = 2'-O-methylcytidine-3'-phosphate
  modified_base 4: mod_base = OTHER; note = 2'-O-methyladenosine-3'-phosphate
  modified_base 5: mod_base = OTHER; note = 2'-O-methylcytidine-3'-phosphate
  modified_base 6: mod_base = OTHER; note = 2'-deoxy-2'-fluorouridine-3'-phosphate
  modified_base 7: mod_base = OTHER; note = 2'-O-methyluridine-3'-phosphate
  modified_base 8: mod_base = OTHER; note = 2'-deoxy-2'-fluorouridine-3'-phosphate
  modified_base 9: mod_base = OTHER; note = 2'-deoxy-2'-fluorocytidine-3'-phosphate
  modified_base 10: mod_base = OTHER; note = 2'-O-methyladenosine-3'-phosphate
  modified_base 11: mod_base = OTHER; note = 2'-O-methylcytidine-3'-phosphate
  modified_base 12: mod_base = OTHER; note = 2'-O-methyladenosine-3'-phosphate
  modified_base 13: mod_base = OTHER; note = 2'-O-methyladenosine-3'-phosphate
  modified_base 14: mod_base = OTHER; note = 2'-deoxy-2'-fluorouridine-3'-phosphate
  modified_base 15: mod_base = OTHER; note = 2'-O-methylcytidine-3'-phosphate
  modified_base 16: mod_base = OTHER; note = 2'-deoxy-2'-fluoroadenosine-3'-phosphate
  modified_base 17: mod_base = OTHER; note = 2'-O-methyluridine-3'-phosphate
  modified_base 18: mod_base = OTHER; note = 2'-O-methylcytidine-3'-phosphate
  modified_base 19: mod_base = OTHER; note = 2'-O-methylcytidine-3'-phosphate
  modified_base 20: mod_base = OTHER; note = 2'-O-methyluridine-3'-phosphate
  modified_base 21: mod_base = OTHER; note = 2'-O-methylcytidine-3'-phosphorothioate
  modified_base 22: mod_base = OTHER; note = 2'-O-methyladenosine-3'-phosphorothioate
  modified_base 23: mod_base = OTHER; note = 2'-O-methyluridine
atcactttcacaatcatcctcat

SEQ ID NO: 439 - RNA, 23 nt, synthetic construct
  source 1..23: mol_type = other RNA
  modified_base 1: mod_base = OTHER; note = 2'-O-methyladenosine-3'-phosphorothioate
  modified_base 2: mod_base = OTHER; note = 2'-deoxy-2'-fluorocytidine-3'-phosphorothioate
  modified_base 3: mod_base = OTHER; note = 2'-O-methyluridine-3'-phosphate
  modified_base 4: mod_base = OTHER; note = 2'-O-methyladenosine-3'-phosphate
  modified_base 5: mod_base = OTHER; note = 2'-O-methylcytidine-3'-phosphate
  modified_base 6: mod_base = OTHER; note = 2'-deoxy-2'-fluorocytidine-3'-phosphate
  modified_base 7: mod_base = OTHER; note = 2'-O-methyladenosine-3'-phosphate
  modified_base 8: mod_base = OTHER; note = 2'-deoxy-2'-fluorocytidine-3'-phosphate
  modified_base 9: mod_base = OTHER; note = 2'-deoxy-2'-fluorouridine-3'-phosphate
  modified_base 10: mod_base = OTHER; note = 2'-O-methylcytidine-3'-phosphate
  modified_base 11: mod_base = OTHER; note = 2'-O-methyluridine-3'-phosphate
  modified_base 12: mod_base = OTHER; note = 2'-O-methylguanosine-3'-phosphate
  modified_base 13: mod_base = OTHER; note = 2'-O-methyluridine-3'-phosphate
  modified_base 14: mod_base = OTHER; note = 2'-deoxy-2'-fluorocytidine-3'-phosphate
  modified_base 15: mod_base = OTHER; note = 2'-O-methyluridine-3'-phosphate
  modified_base 16: mod_base = OTHER; note = 2'-deoxy-2'-fluorocytidine-3'-phosphate
  modified_base 17: mod_base = OTHER; note = 2'-O-methyluridine-3'-phosphate
  modified_base 18: mod_base = OTHER; note = 2'-O-methylguanosine-3'-phosphate
  modified_base 19: mod_base = OTHER; note = 2'-O-methylcytidine-3'-phosphate
  modified_base 20: mod_base = OTHER; note = 2'-O-methyladenosine-3'-phosphate
  modified_base 21: mod_base = OTHER; note = 2'-O-methylguanosine-3'-phosphorothioate
  modified_base 22: mod_base = OTHER; note = 2'-O-methylguanosine-3'-phosphorothioate
  modified_base 23: mod_base = OTHER; note = 2'-O-methylguanosine
actaccactctgtctctgcaggg

SEQ ID NO: 440 - RNA, 23 nt, synthetic construct
  source 1..23: mol_type = other RNA
  modified_base 1: mod_base = OTHER; note = 2'-O-methyladenosine-3'-phosphorothioate
  modified_base 2: mod_base = OTHER; note = 2'-deoxy-2'-fluoroadenosine-3'-phosphorothioate
  modified_base 3: mod_base = OTHER; note = 2'-O-methylguanosine-3'-phosphate
  modified_base 4: mod_base = OTHER; note = 2'-O-methylcytidine-3'-phosphate
  modified_base 5: mod_base = OTHER; note = 2'-O-methyluridine-3'-phosphate
  modified_base 6: mod_base = OTHER; note = 2'-deoxy-2'-fluorocytidine-3'-phosphate
  modified_base 7: mod_base = OTHER; note = 2'-O-methyladenosine-3'-phosphate
  modified_base 8: mod_base = OTHER; note = 2'-deoxy-2'-fluoroguanosine-3'-phosphate
  modified_base 9: mod_base = OTHER; note = 2'-deoxy-2'-fluoroadenosine-3'-phosphate
  modified_base 10: mod_base = OTHER; note = 2'-O-methylcytidine-3'-phosphate
  modified_base 11: mod_base = OTHER; note = 2'-O-methyluridine-3'-phosphate
  modified_base 12: mod_base = OTHER; note = 2'-O-methylcytidine-3'-phosphate
  modified_base 13: mod_base = OTHER; note = 2'-O-methyluridine-3'-phosphate
  modified_base 14: mod_base = OTHER; note = 2'-deoxy-2'-fluorouridine-3'-phosphate
  modified_base 15: mod_base = OTHER; note = 2'-O-methylcytidine-3'-phosphate
  modified_base 16: mod_base = OTHER; note = 2'-deoxy-2'-fluorouridine-3'-phosphate
  modified_base 17: mod_base = OTHER; note = 2'-O-methyladenosine-3'-phosphate
  modified_base 18: mod_base = OTHER; note = 2'-O-methylcytidine-3'-phosphate
  modified_base 19: mod_base = OTHER; note = 2'-O-methylcytidine-3'-phosphate
  modified_base 20: mod_base = OTHER; note = 2'-O-methyladenosine-3'-phosphate
  modified_base 21: mod_base = OTHER; note = 2'-O-methylcytidine-3'-phosphorothioate
  modified_base 22: mod_base = OTHER; note = 2'-O-methyluridine-3'-phosphorothioate
  modified_base 23: mod_base = OTHER; note = 2'-O-methylcytidine
aagctcagactcttctaccactc

SEQ ID NO: 441 - RNA, 23 nt, synthetic construct
  source 1..23: mol_type = other RNA
  modified_base 1: mod_base = OTHER; note = 2'-O-methyladenosine-3'-phosphorothioate
  modified_base 2: mod_base = OTHER; note = 2'-deoxy-2'-fluoroadenosine-3'-phosphorothioate
  modified_base 3: mod_base = OTHER; note = 2'-O-methyluridine-3'-phosphate
  modified_base 4: mod_base = OTHER; note = 2'-O-methyladenosine-3'-phosphate
  modified_base 5: mod_base = OTHER; note = 2'-O-methylguanosine-3'-phosphate
  modified_base 6: mod_base = OTHER; note = 2'-deoxy-2'-fluorocytidine-3'-phosphate
  modified_base 7: mod_base = OTHER; note = 2'-O-methylcytidine-3'-phosphate
  modified_base 8: mod_base = OTHER; note = 2'-deoxy-2'-fluorouridine-3'-phosphate
  modified_base 9: mod_base = OTHER; note = 2'-deoxy-2'-fluoroguanosine-3'-phosphate
  modified_base 10: mod_base = OTHER; note = 2'-O-methylcytidine-3'-phosphate
  modified_base 11: mod_base = OTHER; note = 2'-O-methyluridine-3'-phosphate
  modified_base 12: mod_base = OTHER; note = 2'-O-methylguanosine-3'-phosphate
  modified_base 13: mod_base = OTHER; note = 2'-O-methyluridine-3'-phosphate
  modified_base 14: mod_base = OTHER; note = 2'-deoxy-2'-fluorouridine-3'-phosphate
  modified_base 15: mod_base = OTHER; note = 2'-O-methylcytidine-3'-phosphate
  modified_base 16: mod_base = OTHER; note = 2'-deoxy-2'-fluoroguanosine-3'-phosphate
  modified_base 17: mod_base = OTHER; note = 2'-O-methyluridine-3'-phosphate
  modified_base 18: mod_base = OTHER; note = 2'-O-methylguanosine-3'-phosphate
  modified_base 19: mod_base = OTHER; note = 2'-O-methylcytidine-3'-phosphate
  modified_base 20: mod_base = OTHER; note = 2'-O-methylcytidine-3'-phosphate
  modified_base 21: mod_base = OTHER; note = 2'-O-methyladenosine-3'-phosphorothioate
  modified_base 22: mod_base = OTHER; note = 2'-O-methylguanosine-3'-phosphorothioate
  modified_base 23: mod_base = OTHER; note = 2'-O-methylcytidine
aatagcctgctgttcgtgccagc

SEQ ID NO: 442 - RNA, 23 nt, synthetic construct
  source 1..23: mol_type = other RNA
  modified_base 1: mod_base = OTHER; note = 2'-O-methyladenosine-3'-phosphorothioate
  modified_base 2: mod_base = OTHER; note = 2'-deoxy-2'-fluorocytidine-3'-phosphorothioate
  modified_base 3: mod_base = OTHER; note = 2'-O-methyluridine-3'-phosphate
  modified_base 4: mod_base = OTHER; note = 2'-O-methyladenosine-3'-phosphate
  modified_base 5: mod_base = OTHER; note = 2'-O-methyladenosine-3'-phosphate
  modified_base 6: mod_base = OTHER; note = 2'-deoxy-2'-fluoroadenosine-3'-phosphate
  modified_base 7: mod_base = OTHER; note = 2'-O-methyladenosine-3'-phosphate
  modified_base 8: mod_base = OTHER; note = 2'-deoxy-2'-fluorouridine-3'-phosphate
  modified_base 9: mod_base = OTHER; note = 2'-deoxy-2'-fluoroguanosine-3'-phosphate
  modified_base 10: mod_base = OTHER; note = 2'-O-methyluridine-3'-phosphate
  modified_base 11: mod_base = OTHER; note = 2'-O-methyluridine-3'-phosphate
  modified_base 12: mod_base = OTHER; note = 2'-O-methylguanosine-3'-phosphate
  modified_base 13: mod_base = OTHER; note = 2'-O-methyladenosine-3'-phosphate
  modified_base 14: mod_base = OTHER; note = 2'-deoxy-2'-fluorouridine-3'-phosphate
  modified_base 15: mod_base = OTHER; note = 2'-O-methylcytidine-3'-phosphate
  modified_base 16: mod_base = OTHER; note = 2'-deoxy-2'-fluorocytidine-3'-phosphate
  modified_base 17: mod_base = OTHER; note = 2'-O-methylcytidine-3'-phosphate
  modified_base 18: mod_base = OTHER; note = 2'-O-methyladenosine-3'-phosphate
  modified_base 19: mod_base = OTHER; note = 2'-O-methyluridine-3'-phosphate
  modified_base 20: mod_base = OTHER; note = 2'-O-methyladenosine-3'-phosphate
  modified_base 21: mod_base = OTHER; note = 2'-O-methylguanosine-3'-phosphorothioate
  modified_base 22: mod_base = OTHER; note = 2'-O-methylcytidine-3'-phosphorothioate
  modified_base 23: mod_base = OTHER; note = 2'-O-methylcytidine
actaaaatgttgatcccatagcc

SEQ ID NO: 443 - RNA, 23 nt, synthetic construct
  source 1..23: mol_type = other RNA
  modified_base 1: mod_base = OTHER; note = 2'-O-methyladenosine-3'-phosphorothioate
  modified_base 2: mod_base = OTHER; note = 2'-deoxy-2'-fluoroadenosine-3'-phosphorothioate
  modified_base 3: mod_base = OTHER; note = 2'-O-methyladenosine-3'-phosphate
  modified_base 4: mod_base = OTHER; note = 2'-O-methylcytidine-3'-phosphate
  modified_base 5: mod_base = OTHER; note = 2'-O-methyluridine-3'-phosphate
  modified_base 6: mod_base = OTHER; note = 2'-deoxy-2'-fluorocytidine-3'-phosphate
  modified_base 7: mod_base = OTHER; note = 2'-O-methyladenosine-3'-phosphate
  modified_base 8: mod_base = OTHER; note = 2'-deoxy-2'-fluorouridine-3'-phosphate
  modified_base 9: mod_base = OTHER; note = 2'-deoxy-2'-fluorouridine-3'-phosphate
  modified_base 10: mod_base = OTHER; note = 2'-O-methylguanosine-3'-phosphate
  modified_base 11: mod_base = OTHER; note = 2'-O-methyluridine-3'-phosphate
  modified_base 12: mod_base = OTHER; note = 2'-O-methylcytidine-3'-phosphate
  modified_base 13: mod_base = OTHER; note = 2'-O-methyladenosine-3'-phosphate
  modified_base 14: mod_base = OTHER; note = 2'-deoxy-2'-fluoroadenosine-3'-phosphate
  modified_base 15: mod_base = OTHER; note = 2'-O-methyladenosine-3'-phosphate
  modified_base 16: mod_base = OTHER; note = 2'-deoxy-2'-fluoroadenosine-3'-phosphate
  modified_base 17: mod_base = OTHER; note = 2'-O-methylguanosine-3'-phosphate
  modified_base 18: mod_base = OTHER; note = 2'-O-methylguanosine-3'-phosphate
  modified_base 19: mod_base = OTHER; note = 2'-O-methyluridine-3'-phosphate
  modified_base 20: mod_base = OTHER; note = 2'-O-methylguanosine-3'-phosphate
  modified_base 21: mod_base = OTHER; note = 2'-O-methyluridine-3'-phosphorothioate
  modified_base 22: mod_base = OTHER; note = 2'-O-methylguanosine-3'-phosphorothioate
  modified_base 23: mod_base = OTHER; note = 2'-O-methylcytidine
aaactcattgtcaaaaggtgtgc

SEQ ID NO: 444 - RNA, 23 nt, synthetic construct
  source 1..23: mol_type = other RNA
  modified_base 1: mod_base = OTHER; note = 2'-O-methyladenosine-3'-phosphorothioate
  modified_base 2: mod_base = OTHER; note = 2'-deoxy-2'-fluorouridine-3'-phosphorothioate
  modified_base 3: mod_base = OTHER; note = 2'-O-methyladenosine-3'-phosphate
  modified_base 4: mod_base = OTHER; note = 2'-O-methylcytidine-3'-phosphate
  modified_base 5: mod_base = OTHER; note = 2'-O-methyladenosine-3'-phosphate
  modified_base 6: mod_base = OTHER; note = 2'-deoxy-2'-fluoroguanosine-3'-phosphate
  modified_base 7: mod_base = OTHER; note = 2'-O-methyladenosine-3'-phosphate
  modified_base 8: mod_base = OTHER; note = 2'-deoxy-2'-fluoroguanosine-3'-phosphate
  modified_base 9: mod_base = OTHER; note = 2'-deoxy-2'-fluorouridine-3'-phosphate
  modified_base 10: mod_base = OTHER; note = 2'-O-methylcytidine-3'-phosphate
  modified_base 11: mod_base = OTHER; note = 2'-O-methylcytidine-3'-phosphate
  modified_base 12: mod_base = OTHER; note = 2'-O-methyladenosine-3'-phosphate
  modified_base 13: mod_base = OTHER; note = 2'-O-methyluridine-3'-phosphate
  modified_base 14: mod_base = OTHER; note = 2'-deoxy-2'-fluorouridine-3'-phosphate
  modified_base 15: mod_base = OTHER; note = 2'-O-methylguanosine-3'-phosphate
  modified_base 16: mod_base = OTHER; note = 2'-deoxy-2'-fluorouridine-3'-phosphate
  modified_base 17: mod_base = OTHER; note = 2'-O-methyladenosine-3'-phosphate
  modified_base 18: mod_base = OTHER; note = 2'-O-methylguanosine-3'-phosphate
  modified_base 19: mod_base = OTHER; note = 2'-O-methyladenosine-3'-phosphate
  modified_base 20: mod_base = OTHER; note = 2'-O-methyladenosine-3'-phosphate
  modified_base 21: mod_base = OTHER; note = 2'-O-methylcytidine-3'-phosphorothioate
  modified_base 22: mod_base = OTHER; note = 2'-O-methyluridine-3'-phosphorothioate
  modified_base 23: mod_base = OTHER; note = 2'-O-methylcytidine
atacagagtccattgtagaactc

SEQ ID NO: 445 - RNA, 23 nt, synthetic construct
  source 1..23: mol_type = other RNA
  modified_base 1: mod_base = OTHER; note = 2'-O-methyladenosine-3'-phosphorothioate
  modified_base 2: mod_base = OTHER; note = 2'-deoxy-2'-fluoroadenosine-3'-phosphorothioate
  modified_base 3: mod_base = OTHER; note = 2'-O-methylguanosine-3'-phosphate
  modified_base 4: mod_base = OTHER; note = 2'-O-methyluridine-3'-phosphate
  modified_base 5: mod_base = OTHER; note = 2'-O-methyladenosine-3'-phosphate
  modified_base 6: mod_base = OTHER; note = 2'-deoxy-2'-fluorouridine-3'-phosphate
  modified_base 7: mod_base = OTHER; note = 2'-O-methylguanosine-3'-phosphate
  modified_base 8: mod_base = OTHER; note = 2'-deoxy-2'-fluorouridine-3'-phosphate
  modified_base 9: mod_base = OTHER; note = 2'-deoxy-2'-fluorocytidine-3'-phosphate
  modified_base 10: mod_base = OTHER; note = 2'-O-methyladenosine-3'-phosphate
  modified_base 11: mod_base = OTHER; note = 2'-O-methylguanosine-3'-phosphate
  modified_base 12: mod_base = OTHER; note = 2'-O-methyladenosine-3'-phosphate
  modified_base 13: mod_base = OTHER; note = 2'-O-methylguanosine-3'-phosphate
  modified_base 14: mod_base = OTHER; note = 2'-deoxy-2'-fluorouridine-3'-phosphate
  modified_base 15: mod_base = OTHER; note = 2'-O-methylguanosine-3'-phosphate
  modified_base 16: mod_base = OTHER; note = 2'-deoxy-2'-fluorouridine-3'-phosphate
  modified_base 17: mod_base = OTHER; note = 2'-O-methyluridine-3'-phosphate
  modified_base 18: mod_base = OTHER; note = 2'-O-methyluridine-3'-phosphate
  modified_base 19: mod_base = OTHER; note = 2'-O-methylcytidine-3'-phosphate
  modified_base 20: mod_base = OTHER; note = 2'-O-methylcytidine-3'-phosphate
  modified_base 21: mod_base = OTHER; note = 2'-O-methyladenosine-3'-phosphorothioate
  modified_base 22: mod_base = OTHER; note = 2'-O-methyluridine-3'-phosphorothioate
  modified_base 23: mod_base = OTHER; note = 2'-O-methylcytidine
aagtatgtcagagtgtttccatc

SEQ ID NO: 446 - RNA, 23 nt, synthetic construct
  source 1..23: mol_type = other RNA
  modified_base 1: mod_base = OTHER; note = 2'-O-methyladenosine-3'-phosphorothioate
  modified_base 2: mod_base = OTHER; note = 2'-deoxy-2'-fluoroadenosine-3'-phosphorothioate
  modified_base 3: mod_base = OTHER; note = 2'-O-methyladenosine-3'-phosphate
  modified_base 4: mod_base = OTHER; note = 2'-O-methylguanosine-3'-phosphate
  modified_base 5: mod_base = OTHER; note = 2'-O-methylguanosine-3'-phosphate
  modified_base 6: mod_base = OTHER; note = 2'-deoxy-2'-fluorouridine-3'-phosphate
  modified_base 7: mod_base = OTHER; note = 2'-O-methylcytidine-3'-phosphate
  modified_base 8: mod_base = OTHER; note = 2'-deoxy-2'-fluorouridine-3'-phosphate
  modified_base 9: mod_base = OTHER; note = 2'-deoxy-2'-fluorouridine-3'-phosphate
  modified_base 10: mod_base = OTHER; note = 2'-O-methylcytidine-3'-phosphate
  modified_base 11: mod_base = OTHER; note = 2'-O-methylguanosine-3'-phosphate
  modified_base 12: mod_base = OTHER; note = 2'-O-methylguanosine-3'-phosphate
  modified_base 13: mod_base = OTHER; note = 2'-O-methyluridine-3'-phosphate
  modified_base 14: mod_base = OTHER; note = 2'-deoxy-2'-fluoroadenosine-3'-phosphate
  modified_base 15: mod_base = OTHER; note = 2'-O-methylguanosine-3'-phosphate
  modified_base 16: mod_base = OTHER; note = 2'-deoxy-2'-fluorouridine-3'-phosphate
  modified_base 17: mod_base = OTHER; note = 2'-O-methyladenosine-3'-phosphate
  modified_base 18: mod_base = OTHER; note = 2'-O-methyluridine-3'-phosphate
  modified_base 19: mod_base = OTHER; note = 2'-O-methylguanosine-3'-phosphate
  modified_base 20: mod_base = OTHER; note = 2'-O-methyluridine-3'-phosphate
  modified_base 21: mod_base = OTHER; note = 2'-O-methylcytidine-3'-phosphorothioate
  modified_base 22: mod_base = OTHER; note = 2'-O-methyladenosine-3'-phosphorothioate
  modified_base 23: mod_base = OTHER; note = 2'-O-methylguanosine
aaaggtcttcggtagtatgtcag

SEQ ID NO: 447 - RNA, 23 nt, synthetic construct
  source 1..23: mol_type = other RNA
  modified_base 1: mod_base = OTHER; note = 2'-O-methyladenosine-3'-phosphorothioate
  modified_base 2: mod_base = OTHER; note = 2'-deoxy-2'-fluoroadenosine-3'-phosphorothioate
  modified_base 3: mod_base = OTHER; note = 2'-O-methylguanosine-3'-phosphate
  modified_base 4: mod_base = OTHER; note = 2'-O-methyladenosine-3'-phosphate
  modified_base 5: mod_base = OTHER; note = 2'-O-methyluridine-3'-phosphate
  modified_base 6: mod_base = OTHER; note = 2'-deoxy-2'-fluorocytidine-3'-phosphate
  modified_base 7: mod_base = OTHER; note = 2'-O-methyladenosine-3'-phosphate
  modified_base 8: mod_base = OTHER; note = 2'-deoxy-2'-fluoroadenosine-3'-phosphate
  modified_base 9: mod_base = OTHER; note = 2'-deoxy-2'-fluoroadenosine-3'-phosphate
  modified_base 10: mod_base = OTHER; note = 2'-O-methylguanosine-3'-phosphate
  modified_base 11: mod_base = OTHER; note = 2'-O-methyladenosine-3'-phosphate
  modified_base 12: mod_base = OTHER; note = 2'-O-methyladenosine-3'-phosphate
  modified_base 13: mod_base = OTHER; note = 2'-O-methylguanosine-3'-phosphate
  modified_base 14: mod_base = OTHER; note = 2'-deoxy-2'-fluorocytidine-3'-phosphate
  modified_base 15: mod_base = OTHER; note = 2'-O-methylcytidine-3'-phosphate
  modified_base 16: mod_base = OTHER; note = 2'-deoxy-2'-fluoroadenosine-3'-phosphate
  modified_base 17: mod_base = OTHER; note = 2'-O-methylcytidine-3'-phosphate
  modified_base 18: mod_base = OTHER; note = 2'-O-methylguanosine-3'-phosphate
  modified_base 19: mod_base = OTHER; note = 2'-O-methyluridine-3'-phosphate
  modified_base 20: mod_base = OTHER; note = 2'-O-methyluridine-3'-phosphate
  modified_base 21: mod_base = OTHER; note = 2'-O-methylcytidine-3'-phosphorothioate
  modified_base 22: mod_base = OTHER; note = 2'-O-methylcytidine-3'-phosphorothioate
  modified_base 23: mod_base = OTHER; note = 2'-O-methyladenosine
aagatcaaagaagccacgttcca

SEQ ID NO: 448 - RNA, 23 nt, synthetic construct
  source 1..23: mol_type = other RNA
  modified_base 1: mod_base = OTHER; note = 2'-O-methyladenosine-3'-phosphorothioate
  modified_base 2: mod_base = OTHER; note = 2'-deoxy-2'-fluorocytidine-3'-phosphorothioate
  modified_base 3: mod_base = OTHER; note = 2'-O-methyluridine-3'-phosphate
  modified_base 4: mod_base = OTHER; note = 2'-O-methyluridine-3'-phosphate
  modified_base 5: mod_base = OTHER; note = 2'-O-methyluridine-3'-phosphate
  modified_base 6: mod_base = OTHER; note = 2'-deoxy-2'-fluoroguanosine-3'-phosphate
  modified_base 7: mod_base = OTHER; note = 2'-O-methylguanosine-3'-phosphate
  modified_base 8: mod_base = OTHER; note = 2'-deoxy-2'-fluorouridine-3'-phosphate
  modified_base 9: mod_base = OTHER; note = 2'-deoxy-2'-fluorouridine-3'-phosphate
  modified_base 10: mod_base = OTHER; note = 2'-O-methyluridine-3'-phosphate
  modified_base 11: mod_base = OTHER; note = 2'-O-methylcytidine-3'-phosphate
  modified_base 12: mod_base = OTHER; note = 2'-O-methyladenosine-3'-phosphate
  modified_base 13: mod_base = OTHER; note = 2'-O-methyluridine-3'-phosphate
  modified_base 14: mod_base = OTHER; note = 2'-deoxy-2'-fluoroadenosine-3'-phosphate
  modified_base 15: mod_base = OTHER; note = 2'-O-methylguanosine-3'-phosphate
  modified_base 16: mod_base = OTHER; note = 2'-deoxy-2'-fluoroadenosine-3'-phosphate
  modified_base 17: mod_base = OTHER; note = 2'-O-methyluridine-3'-phosphate
  modified_base 18: mod_base = OTHER; note = 2'-O-methylcytidine-3'-phosphate
  modified_base 19: mod_base = OTHER; note = 2'-O-methyladenosine-3'-phosphate
  modified_base 20: mod_base = OTHER; note = 2'-O-methyladenosine-3'-phosphate
  modified_base 21: mod_base = OTHER; note = 2'-O-methyladenosine-3'-phosphorothioate
  modified_base 22: mod_base = OTHER; note = 2'-O-methylguanosine-3'-phosphorothioate
  modified_base 23: mod_base = OTHER; note = 2'-O-methyladenosine
actttggtttcatagatcaaaga

SEQ ID NO: 449 - RNA, 23 nt, synthetic construct
  source 1..23: mol_type = other RNA
  modified_base 1: mod_base = OTHER; note = 2'-O-methyladenosine-3'-phosphorothioate
  modified_base 2: mod_base = OTHER; note = 2'-deoxy-2'-fluoroguanosine-3'-phosphorothioate
  modified_base 3: mod_base = OTHER; note = 2'-O-methyluridine-3'-phosphate
  modified_base 4: mod_base = OTHER; note = 2'-O-methyluridine-3'-phosphate
  modified_base 5: mod_base = OTHER; note = 2'-O-methylcytidine-3'-phosphate
  modified_base 6: mod_base = OTHER; note = 2'-deoxy-2'-fluorouridine-3'-phosphate
  modified_base 7: mod_base = OTHER; note = 2'-O-methyluridine-3'-phosphate
  modified_base 8: mod_base = OTHER; note = 2'-deoxy-2'-fluorocytidine-3'-phosphate
  modified_base 9: mod_base = OTHER; note = 2'-deoxy-2'-fluoroguanosine-3'-phosphate
  modified_base 10: mod_base = OTHER; note = 2'-O-methyluridine-3'-phosphate
  modified_base 11: mod_base = OTHER; note = 2'-O-methyladenosine-3'-phosphate
  modified_base 12: mod_base = OTHER; note = 2'-O-methyladenosine-3'-phosphate
  modified_base 13: mod_base = OTHER; note = 2'-O-methyluridine-3'-phosphate
  modified_base 14: mod_base = OTHER; note = 2'-deoxy-2'-fluoroguanosine-3'-phosphate
  modified_base 15: mod_base = OTHER; note = 2'-O-methyluridine-3'-phosphate
  modified_base 16: mod_base = OTHER; note = 2'-deoxy-2'-fluorouridine-3'-phosphate
  modified_base 17: mod_base = OTHER; note = 2'-O-methylcytidine-3'-phosphate
  modified_base 18: mod_base = OTHER; note = 2'-O-methylguanosine-3'-phosphate
  modified_base 19: mod_base = OTHER; note = 2'-O-methylguanosine-3'-phosphate
  modified_base 20: mod_base = OTHER; note = 2'-O-methyluridine-3'-phosphate
  modified_base 21: mod_base = OTHER; note = 2'-O-methyluridine-3'-phosphorothioate
  modified_base 22: mod_base = OTHER; note = 2'-O-methylcytidine-3'-phosphorothioate
  modified_base 23: mod_base = OTHER; note = 2'-O-methyluridine
agttcttcgtaatgttcggttct

SEQ ID NO: 450 - RNA, 23 nt, synthetic construct
  source 1..23: mol_type = other RNA
  modified_base 1: mod_base = OTHER; note = 2'-O-methyladenosine-3'-phosphorothioate
  modified_base 2: mod_base = OTHER; note = 2'-deoxy-2'-fluoroadenosine-3'-phosphorothioate
  modified_base 3: mod_base = OTHER; note = 2'-O-methyladenosine-3'-phosphate
  modified_base 4: mod_base = OTHER; note = 2'-O-methyladenosine-3'-phosphate
  modified_base 5: mod_base = OTHER; note = 2'-O-methyluridine-3'-phosphate
  modified_base 6: mod_base = OTHER; note = 2'-deoxy-2'-fluoroguanosine-3'-phosphate
  modified_base 7: mod_base = OTHER; note = 2'-O-methylcytidine-3'-phosphate
  modified_base 8: mod_base = OTHER; note = 2'-deoxy-2'-fluorouridine-3'-phosphate
  modified_base 9: mod_base = OTHER; note = 2'-deoxy-2'-fluorouridine-3'-phosphate
  modified_base 10: mod_base = OTHER; note = 2'-O-methylcytidine-3'-phosphate
  modified_base 11: mod_base = OTHER; note = 2'-O-methyladenosine-3'-phosphate
  modified_base 12: mod_base = OTHER; note = 2'-O-methyladenosine-3'-phosphate
  modified_base 13: mod_base = OTHER; note = 2'-O-methyluridine-3'-phosphate
  modified_base 14: mod_base = OTHER; note = 2'-deoxy-2'-fluorouridine-3'-phosphate
  modified_base 15: mod_base = OTHER; note = 2'-O-methyluridine-3'-phosphate
  modified_base 16: mod_base = OTHER; note = 2'-deoxy-2'-fluoroguanosine-3'-phosphate
  modified_base 17: mod_base = OTHER; note = 2'-O-methyluridine-3'-phosphate
  modified_base 18: mod_base = OTHER; note = 2'-O-methyluridine-3'-phosphate
  modified_base 19: mod_base = OTHER; note = 2'-O-methylcytidine-3'-phosphate
  modified_base 20: mod_base = OTHER; note = 2'-O-methyluridine-3'-phosphate
  modified_base 21: mod_base = OTHER; note = 2'-O-methyluridine-3'-phosphorothioate
  modified_base 22: mod_base = OTHER; note = 2'-O-methylcytidine-3'-phosphorothioate
  modified_base 23: mod_base = OTHER; note = 2'-O-methylguanosine
aaaatgcttcaatttgttcttcg

SEQ ID NO: 451 - RNA, 23 nt, synthetic construct
  source 1..23: mol_type = other RNA
  modified_base 1: mod_base = OTHER; note = 2'-O-methyladenosine-3'-phosphorothioate
  modified_base 2: mod_base = OTHER; note = 2'-deoxy-2'-fluoroguanosine-3'-phosphorothioate
  modified_base 3: mod_base = OTHER; note = 2'-O-methyladenosine-3'-phosphate
  modified_base 4: mod_base = OTHER; note = 2'-O-methyluridine-3'-phosphate
  modified_base 5: mod_base = OTHER; note = 2'-O-methylguanosine-3'-phosphate
  modified_base 6: mod_base = OTHER; note = 2'-deoxy-2'-fluoroadenosine-3'-phosphate
  modified_base 7: mod_base = OTHER; note = 2'-O-methyluridine-3'-phosphate
  modified_base 8: mod_base = OTHER; note = 2'-deoxy-2'-fluoroadenosine-3'-phosphate
  modified_base 9: mod_base = OTHER; note = 2'-deoxy-2'-fluorocytidine-3'-phosphate
  modified_base 10: mod_base = OTHER; note = 2'-O-methyluridine-3'-phosphate
  modified_base 11: mod_base = OTHER; note = 2'-O-methyluridine-3'-phosphate
  modified_base 12: mod_base = OTHER; note = 2'-O-methyluridine-3'-phosphate
  modified_base 13: mod_base = OTHER; note = 2'-O-methyluridine-3'-phosphate
  modified_base 14: mod_base = OTHER; note = 2'-deoxy-2'-fluoroadenosine-3'-phosphate
  modified_base 15: mod_base = OTHER; note = 2'-O-methyladenosine-3'-phosphate
  modified_base 16: mod_base = OTHER; note = 2'-deoxy-2'-fluoroadenosine-3'-phosphate
  modified_base 17: mod_base = OTHER; note = 2'-O-methyluridine-3'-phosphate
  modified_base 18: mod_base = OTHER; note = 2'-O-methylguanosine-3'-phosphate
  modified_base 19: mod_base = OTHER; note = 2'-O-methylcytidine-3'-phosphate
  modified_base 20: mod_base = OTHER; note = 2'-O-methyluridine-3'-phosphate
  modified_base 21: mod_base = OTHER; note = 2'-O-methyluridine-3'-phosphorothioate
  modified_base 22: mod_base = OTHER; note = 2'-O-methylcytidine-3'-phosphorothioate
  modified_base 23: mod_base = OTHER; note = 2'-O-methyladenosine
agatgatacttttaaatgcttca

SEQ ID NO: 452 - RNA, 23 nt, synthetic construct
  source 1..23: mol_type = other RNA
  modified_base 1: mod_base = OTHER; note = 2'-O-methyladenosine-3'-phosphorothioate
  modified_base 2: mod_base = OTHER; note = 2'-deoxy-2'-fluoroadenosine-3'-phosphorothioate
  modified_base 3: mod_base = OTHER; note = 2'-O-methyluridine-3'-phosphate
  modified_base 4: mod_base = OTHER; note = 2'-O-methylguanosine-3'-phosphate
  modified_base 5: mod_base = OTHER; note = 2'-O-methyluridine-3'-phosphate
  modified_base 6: mod_base = OTHER; note = 2'-deoxy-2'-fluorocytidine-3'-phosphate
  modified_base 7: mod_base = OTHER; note = 2'-O-methyluridine-3'-phosphate
  modified_base 8: mod_base = OTHER; note = 2'-deoxy-2'-fluorouridine-3'-phosphate
  modified_base 9: mod_base = OTHER; note = 2'-deoxy-2'-fluorocytidine-3'-phosphate
  modified_base 10: mod_base = OTHER; note = 2'-O-methyluridine-3'-phosphate
  modified_base 11: mod_base = OTHER; note = 2'-O-methylcytidine-3'-phosphate
  modified_base 12: mod_base = OTHER; note = 2'-O-methyluridine-3'-phosphate
  modified_base 13: mod_base = OTHER; note = 2'-O-methyluridine-3'-phosphate
  modified_base 14: mod_base = OTHER; note = 2'-deoxy-2'-fluoroguanosine-3'-phosphate
  modified_base 15: mod_base = OTHER; note = 2'-O-methylguanosine-3'-phosphate
  modified_base 16: mod_base = OTHER; note = 2'-deoxy-2'-fluoroadenosine-3'-phosphate
  modified_base 17: mod_base = OTHER; note = 2'-O-methyluridine-3'-phosphate
  modified_base 18: mod_base = OTHER; note = 2'-O-methylguanosine-3'-phosphate
  modified_base 19: mod_base = OTHER; note = 2'-O-methyladenosine-3'-phosphate
  modified_base 20: mod_base = OTHER; note = 2'-O-methyluridine-3'-phosphate
  modified_base 21: mod_base = OTHER; note = 2'-O-methyladenosine-3'-phosphorothioate
  modified_base 22: mod_base = OTHER; note = 2'-O-methylcytidine-3'-phosphorothioate
  modified_base 23: mod_base = OTHER; note = 2'-O-methyluridine
aatgtcttctcttggatgatact

SEQ ID NO: 453 - RNA, 23 nt, synthetic construct
  source 1..23: mol_type = other RNA
  modified_base 1: mod_base = OTHER; note = 2'-O-methyladenosine-3'-phosphorothioate
  modified_base 2: mod_base = OTHER; note = 2'-deoxy-2'-fluorocytidine-3'-phosphorothioate
  modified_base 3: mod_base = OTHER; note = 2'-O-methyladenosine-3'-phosphate
  modified_base 4: mod_base = OTHER; note = 2'-O-methyluridine-3'-phosphate
  modified_base 5: mod_base = OTHER; note = 2'-O-methyluridine-3'-phosphate
  modified_base 6: mod_base = OTHER; note = 2'-deoxy-2'-fluoroadenosine-3'-phosphate
  modified_base 7: mod_base = OTHER; note = 2'-O-methyladenosine-3'-phosphate
  modified_base 8: mod_base = OTHER; note = 2'-deoxy-2'-fluoroadenosine-3'-phosphate
  modified_base 9: mod_base = OTHER; note = 2'-deoxy-2'-fluoroadenosine-3'-phosphate
  modified_base 10: mod_base = OTHER; note = 2'-O-methyluridine-3'-phosphate
  modified_base 11: mod_base = OTHER; note = 2'-O-methyluridine-3'-phosphate
  modified_base 12: mod_base = OTHER; note = 2'-O-methyluridine-3'-phosphate
  modified_base 13: mod_base = OTHER; note = 2'-O-methylguanosine-3'-phosphate
  modified_base 14: mod_base = OTHER; note = 2'-deoxy-2'-fluoroadenosine-3'-phosphate
  modified_base 15: mod_base = OTHER; note = 2'-O-methyluridine-3'-phosphate
  modified_base 16: mod_base = OTHER; note = 2'-deoxy-2'-fluoroguanosine-3'-phosphate
  modified_base 17: mod_base = OTHER; note = 2'-O-methyluridine-3'-phosphate
  modified_base 18: mod_base = OTHER; note = 2'-O-methylcytidine-3'-phosphate
  modified_base 19: mod_base = OTHER; note = 2'-O-methyluridine-3'-phosphate
  modified_base 20: mod_base = OTHER; note = 2'-O-methyluridine-3'-phosphate
  modified_base 21: mod_base = OTHER; note = 2'-O-methylcytidine-3'-phosphorothioate
  modified_base 22: mod_base = OTHER; note = 2'-O-methyluridine-3'-phosphorothioate
  modified_base 23: mod_base = OTHER; note = 2'-O-methylcytidine
acattaaaatttgatgtcttctc

SEQ ID NO: 454 - RNA, 23 nt, synthetic construct
  source 1..23: mol_type = other RNA
  modified_base 1: mod_base = OTHER; note = 2'-O-methyladenosine-3'-phosphorothioate
  modified_base 2: mod_base = OTHER; note = 2'-deoxy-2'-fluoroadenosine-3'-phosphorothioate
  modified_base 3: mod_base = OTHER; note = 2'-O-methylguanosine-3'-phosphate
  modified_base 4: mod_base = OTHER; note = 2'-O-methyladenosine-3'-phosphate
  modified_base 5: mod_base = OTHER; note = 2'-O-methylguanosine-3'-phosphate
  modified_base 6: mod_base = OTHER; note = 2'-deoxy-2'-fluoroadenosine-3'-phosphate
  modified_base 7: mod_base = OTHER; note = 2'-O-methyluridine-3'-phosphate
  modified_base 8: mod_base = OTHER; note = 2'-deoxy-2'-fluoroadenosine-3'-phosphate
  modified_base 9: mod_base = OTHER; note = 2'-deoxy-2'-fluorouridine-3'-phosphate
  modified_base 10: mod_base = OTHER; note = 2'-O-methyladenosine-3'-phosphate
  modified_base 11: mod_base = OTHER; note = 2'-O-methylguanosine-3'-phosphate
  modified_base 12: mod_base = OTHER; note = 2'-O-methylcytidine-3'-phosphate
  modified_base 13: mod_base = OTHER; note = 2'-O-methyluridine-3'-phosphate
  modified_base 14: mod_base = OTHER; note = 2'-deoxy-2'-fluoroguanosine-3'-phosphate
  modified_base 15: mod_base = OTHER; note = 2'-O-methylcytidine-3'-phosphate
  modified_base 16: mod_base = OTHER; note = 2'-deoxy-2'-fluoroadenosine-3'-phosphate
  modified_base 17: mod_base = OTHER; note = 2'-O-methyluridine-3'-phosphate
  modified_base 18: mod_base = OTHER; note = 2'-O-methyluridine-3'-phosphate
  modified_base 19: mod_base = OTHER; note = 2'-O-methyladenosine-3'-phosphate
  modified_base 20: mod_base = OTHER; note = 2'-O-methyladenosine-3'-phosphate
  modified_base 21: mod_base = OTHER; note = 2'-O-methyladenosine-3'-phosphorothioate
  modified_base 22: mod_base = OTHER; note = 2'-O-methyladenosine-3'-phosphorothioate
  modified_base 23: mod_base = OTHER; note = 2'-O-methyluridine
aagagatatagctgcattaaaat

SEQ ID NO: 455 - RNA, 23 nt, synthetic construct
  source 1..23: mol_type = other RNA
  modified_base 1: mod_base = OTHER; note = 2'-O-methyladenosine-3'-phosphorothioate
  modified_base 2: mod_base = OTHER; note = 2'-deoxy-2'-fluoroguanosine-3'-phosphorothioate
  modified_base 3: mod_base = OTHER; note = 2'-O-methylguanosine-3'-phosphate
  modified_base 4: mod_base = OTHER; note = 2'-O-methyluridine-3'-phosphate
  modified_base 5: mod_base = OTHER; note = 2'-O-methylguanosine-3'-phosphate
  modified_base 6: mod_base = OTHER; note = 2'-deoxy-2'-fluorouridine-3'-phosphate
  modified_base 7: mod_base = OTHER; note = 2'-O-methyladenosine-3'-phosphate
  modified_base 8: mod_base = OTHER; note = 2'-deoxy-2'-fluoroadenosine-3'-phosphate
  modified_base 9: mod_base = OTHER; note = 2'-deoxy-2'-fluoroadenosine-3'-phosphate
  modified_base 10: mod_base = OTHER; note = 2'-O-methyluridine-3'-phosphate
  modified_base 11: mod_base = OTHER; note = 2'-O-methyluridine-3'-phosphate
  modified_base 12: mod_base = OTHER; note = 2'-O-methyluridine-3'-phosphate
  modified_base 13: mod_base = OTHER; note = 2'-O-methyluridine-3'-phosphate
  modified_base 14: mod_base = OTHER; note = 2'-deoxy-2'-fluoroadenosine-3'-phosphate
  modified_base 15: mod_base = OTHER; note = 2'-O-methylguanosine-3'-phosphate
  modified_base 16: mod_base = OTHER; note = 2'-deoxy-2'-fluoroadenosine-3'-phosphate
  modified_base 17: mod_base = OTHER; note = 2'-O-methylguanosine-3'-phosphate
  modified_base 18: mod_base = OTHER; note = 2'-O-methyladenosine-3'-phosphate
  modified_base 19: mod_base = OTHER; note = 2'-O-methyluridine-3'-phosphate
  modified_base 20: mod_base = OTHER; note = 2'-O-methyladenosine-3'-phosphate
  modified_base 21: mod_base = OTHER; note = 2'-O-methyluridine-3'-phosphorothioate
  modified_base 22: mod_base = OTHER; note = 2'-O-methyladenosine-3'-phosphorothioate
  modified_base 23: mod_base = OTHER; note = 2'-O-methylguanosine
aggtgtaaattttagagatatag

SEQ ID NO: 456 - RNA, 23 nt, synthetic construct
  source 1..23: mol_type = other RNA
  modified_base 1: mod_base = OTHER; note = 2'-O-methyladenosine-3'-phosphorothioate
  modified_base 2: mod_base = OTHER; note = 2'-deoxy-2'-fluoroadenosine-3'-phosphorothioate
  modified_base 3: mod_base = OTHER; note = 2'-O-methylguanosine-3'-phosphate
  modified_base 4: mod_base = OTHER; note = 2'-O-methylcytidine-3'-phosphate
  modified_base 5: mod_base = OTHER; note = 2'-O-methyluridine-3'-phosphate
  modified_base 6: mod_base = OTHER; note = 2'-deoxy-2'-fluorouridine-3'-phosphate
  modified_base 7: mod_base = OTHER; note = 2'-O-methyluridine-3'-phosphate
  modified_base 8: mod_base = OTHER; note = 2'-deoxy-2'-fluoroadenosine-3'-phosphate
  modified_base 9: mod_base = OTHER; note = 2'-deoxy-2'-fluorouridine-3'-phosphate
  modified_base 10: mod_base = OTHER; note = 2'-O-methyluridine-3'-phosphate
  modified_base 11: mod_base = OTHER; note = 2'-O-methyluridine-3'-phosphate
  modified_base 12: mod_base = OTHER; note = 2'-O-methylguanosine-3'-phosphate
  modified_base 13: mod_base = OTHER; note = 2'-O-methyluridine-3'-phosphate
  modified_base 14: mod_base = OTHER; note = 2'-deoxy-2'-fluorouridine-3'-phosphate
  modified_base 15: mod_base = OTHER; note = 2'-O-methyluridine-3'-phosphate
  modified_base 16: mod_base = OTHER; note = 2'-deoxy-2'-fluorocytidine-3'-phosphate
  modified_base 17: mod_base = OTHER; note = 2'-O-methyladenosine-3'-phosphate
  modified_base 18: mod_base = OTHER; note = 2'-O-methylguanosine-3'-phosphate
  modified_base 19: mod_base = OTHER; note = 2'-O-methyluridine-3'-phosphate
  modified_base 20: mod_base = OTHER; note = 2'-O-methylguanosine-3'-phosphate
  modified_base 21: mod_base = OTHER; note = 2'-O-methylguanosine-3'-phosphorothioate
  modified_base 22: mod_base = OTHER; note = 2'-O-methylguanosine-3'-phosphorothioate
  modified_base 23: mod_base = OTHER; note = 2'-O-methyluridine
aagctttatttgtttcagtgggt

SEQ ID NO: 457 - RNA, 23 nt, synthetic construct
  source 1..23: mol_type = other RNA
  modified_base 1: mod_base = OTHER; note = 2'-O-methyladenosine-3'-phosphorothioate
  modified_base 2: mod_base = OTHER; note = 2'-deoxy-2'-fluorouridine-3'-phosphorothioate
  modified_base 3: mod_base = OTHER; note = 2'-O-methyluridine-3'-phosphate
  modified_base 4: mod_base = OTHER; note = 2'-O-methylcytidine-3'-phosphate
  modified_base 5: mod_base = OTHER; note = 2'-O-methylcytidine-3'-phosphate
  modified_base 6: mod_base = OTHER; note = 2'-deoxy-2'-fluorouridine-3'-phosphate
  modified_base 7: mod_base = OTHER; note = 2'-O-methylcytidine-3'-phosphate
  modified_base 8: mod_base = OTHER; note = 2'-deoxy-2'-fluoroadenosine-3'-phosphate
  modified_base 9: mod_base = OTHER; note = 2'-deoxy-2'-fluorocytidine-3'-phosphate
  modified_base 10: mod_base = OTHER; note = 2'-O-methyladenosine-3'-phosphate
  modified_base 11: mod_base = OTHER; note = 2'-O-methyladenosine-3'-phosphate
  modified_base 12: mod_base = OTHER; note = 2'-O-methylcytidine-3'-phosphate
  modified_base 13: mod_base = OTHER; note = 2'-O-methyladenosine-3'-phosphate
  modified_base 14: mod_base = OTHER; note = 2'-deoxy-2'-fluorouridine-3'-phosphate
  modified_base 15: mod_base = OTHER; note = 2'-O-methyluridine-3'-phosphate
  modified_base 16: mod_base = OTHER; note = 2'-deoxy-2'-fluoroguanosine-3'-phosphate
  modified_base 17: mod_base = OTHER; note = 2'-O-methyluridine-3'-phosphate
  modified_base 18: mod_base = OTHER; note = 2'-O-methyluridine-3'-phosphate
  modified_base 19: mod_base = OTHER; note = 2'-O-methylcytidine-3'-phosphate
  modified_base 20: mod_base = OTHER; note = 2'-O-methyladenosine-3'-phosphate
  modified_base 21: mod_base = OTHER; note = 2'-O-methylguanosine-3'-phosphorothioate
  modified_base 22: mod_base = OTHER; note = 2'-O-methylcytidine-3'-phosphorothioate
  modified_base 23: mod_base = OTHER; note = 2'-O-methyluridine
attcctcacaacattgttcagct

SEQ ID NO: 458 - RNA, 23 nt, synthetic construct
  source 1..23: mol_type = other RNA
  modified_base 1: mod_base = OTHER; note = 2'-O-methyladenosine-3'-phosphorothioate
  modified_base 2: mod_base = OTHER; note = 2'-deoxy-2'-fluorouridine-3'-phosphorothioate
  modified_base 3: mod_base = OTHER; note = 2'-O-methylguanosine-3'-phosphate
  modified_base 4: mod_base = OTHER; note = 2'-O-methyladenosine-3'-phosphate
  modified_base 5: mod_base = OTHER; note = 2'-O-methylguanosine-3'-phosphate
  modified_base 6: mod_base = OTHER; note = 2'-deoxy-2'-fluoroguanosine-3'-phosphate
  modified_base 7: mod_base = OTHER; note = 2'-O-methyladenosine-3'-phosphate
  modified_base 8: mod_base = OTHER; note = 2'-deoxy-2'-fluoroguanosine-3'-phosphate
  modified_base 9: mod_base = OTHER; note = 2'-deoxy-2'-fluoroguanosine-3'-phosphate
  modified_base 10: mod_base = OTHER; note = 2'-O-methylcytidine-3'-phosphate
  modified_base 11: mod_base = OTHER; note = 2'-O-methyluridine-3'-phosphate
  modified_base 12: mod_base = OTHER; note = 2'-O-methylguanosine-3'-phosphate
  modified_base 13: mod_base = OTHER; note = 2'-O-methyluridine-3'-phosphate
  modified_base 14: mod_base = OTHER; note = 2'-deoxy-2'-fluorouridine-3'-phosphate
  modified_base 15: mod_base = OTHER; note = 2'-O-methyluridine-3'-phosphate
  modified_base 16: mod_base = OTHER; note = 2'-deoxy-2'-fluorocytidine-3'-phosphate
  modified_base 17: mod_base = OTHER; note = 2'-O-methylcytidine-3'-phosphate
  modified_base 18: mod_base = OTHER; note = 2'-O-methyluridine-3'-phosphate
  modified_base 19: mod_base = OTHER; note = 2'-O-methylcytidine-3'-phosphate
  modified_base 20: mod_base = OTHER; note = 2'-O-methyladenosine-3'-phosphate
  modified_base 21: mod_base = OTHER; note = 2'-O-methylcytidine-3'-phosphorothioate
  modified_base 22: mod_base = OTHER; note = 2'-O-methyladenosine-3'-phosphorothioate
  modified_base 23: mod_base = OTHER; note = 2'-O-methyladenosine
atgaggaggctgtttcctcacaa

SEQ ID NO: 459 - RNA, 23 nt, synthetic construct
  source 1..23: mol_type = other RNA
  modified_base 1: mod_base = OTHER; note = 2'-O-methyladenosine-3'-phosphorothioate
  modified_base 2: mod_base = OTHER; note = 2'-deoxy-2'-fluoroadenosine-3'-phosphorothioate
  modified_base 3: mod_base = OTHER; note = 2'-O-methyluridine-3'-phosphate
  modified_base 4: mod_base = OTHER; note = 2'-O-methylguanosine-3'-phosphate
  modified_base 5: mod_base = OTHER; note = 2'-O-methyluridine-3'-phosphate
  modified_base 6: mod_base = OTHER; note = 2'-deoxy-2'-fluoroadenosine-3'-phosphate
  modified_base 7: mod_base = OTHER; note = 2'-O-methyladenosine-3'-phosphate
  modified_base 8: mod_base = OTHER; note = 2'-deoxy-2'-fluoroadenosine-3'-phosphate
  modified_base 9: mod_base = OTHER; note = 2'-deoxy-2'-fluoroguanosine-3'-phosphate
  modified_base 10: mod_base = OTHER; note = 2'-O-methyladenosine-3'-phosphate
  modified_base 11: mod_base = OTHER; note = 2'-O-methyladenosine-3'-phosphate
  modified_base 12: mod_base = OTHER; note = 2'-O-methyladenosine-3'-phosphate
  modified_base 13: mod_base = OTHER; note = 2'-O-methyluridine-3'-phosphate
  modified_base 14: mod_base = OTHER; note = 2'-deoxy-2'-fluorouridine-3'-phosphate
  modified_base 15: mod_base = OTHER; note = 2'-O-methylguanosine-3'-phosphate
  modified_base 16: mod_base = OTHER; note = 2'-deoxy-2'-fluoroadenosine-3'-phosphate
  modified_base 17: mod_base = OTHER; note = 2'-O-methylguanosine-3'-phosphate
  modified_base 18: mod_base = OTHER; note = 2'-O-methylguanosine-3'-phosphate
  modified_base 19: mod_base = OTHER; note = 2'-O-methyladenosine-3'-phosphate
  modified_base 20: mod_base = OTHER; note = 2'-O-methylguanosine-3'-phosphate
  modified_base 21: mod_base = OTHER; note = 2'-O-methylguanosine-3'-phosphorothioate
  modified_base 22: mod_base = OTHER; note = 2'-O-methylcytidine-3'-phosphorothioate
  modified_base 23: mod_base = OTHER; note = 2'-O-methyluridine
aatgtaaagaaattgaggaggct

SEQ ID NO: 460 - RNA, 23 nt, synthetic construct
  source 1..23: mol_type = other RNA
  modified_base 1: mod_base = OTHER; note = 2'-O-methyladenosine-3'-phosphorothioate
  modified_base 2: mod_base = OTHER; note = 2'-deoxy-2'-fluoroadenosine-3'-phosphorothioate
  modified_base 3: mod_base = OTHER; note = 2'-O-methyladenosine-3'-phosphate
  modified_base 4: mod_base = OTHER; note = 2'-O-methyladenosine-3'-phosphate
  modified_base 5: mod_base = OTHER; note = 2'-O-methylcytidine-3'-phosphate
  modified_base 6: mod_base = OTHER; note = 2'-deoxy-2'-fluorocytidine-3'-phosphate
  modified_base 7: mod_base = OTHER; note = 2'-O-methylguanosine-3'-phosphate
  modified_base 8: mod_base = OTHER; note = 2'-deoxy-2'-fluoroadenosine-3'-phosphate
  modified_base 9: mod_base = OTHER; note = 2'-deoxy-2'-fluoroadenosine-3'-phosphate
  modified_base 10: mod_base = OTHER; note = 2'-O-methyladenosine-3'-phosphate
  modified_base 11: mod_base = OTHER; note = 2'-O-methyladenosine-3'-phosphate
  modified_base 12: mod_base = OTHER; note = 2'-O-methylcytidine-3'-phosphate
  modified_base 13: mod_base = OTHER; note = 2'-O-methyluridine-3'-phosphate
  modified_base 14: mod_base = OTHER; note = 2'-deoxy-2'-fluoroadenosine-3'-phosphate
  modified_base 15: mod_base = OTHER; note = 2'-O-methylcytidine-3'-phosphate
  modified_base 16: mod_base = OTHER; note = 2'-deoxy-2'-fluorocytidine-3'-phosphate
  modified_base 17: mod_base = OTHER; note = 2'-O-methylcytidine-3'-phosphate
  modified_base 18: mod_base = OTHER; note = 2'-O-methyluridine-3'-phosphate
  modified_base 19: mod_base = OTHER; note = 2'-O-methyluridine-3'-phosphate
  modified_base 20: mod_base = OTHER; note = 2'-O-methylguanosine-3'-phosphate
  modified_base 21: mod_base = OTHER; note = 2'-O-methylcytidine-3'-phosphorothioate
  modified_base 22: mod_base = OTHER; note = 2'-O-methylcytidine-3'-phosphorothioate
  modified_base 23: mod_base = OTHER; note = 2'-O-methyladenosine
aaaaccgaaaactacccttgcca

SEQ ID NO: 461 - RNA, 23 nt, synthetic construct
  source 1..23: mol_type = other RNA
  modified_base 1: mod_base = OTHER; note = 2'-O-methyladenosine-3'-phosphorothioate
  modified_base 2: mod_base = OTHER; note = 2'-deoxy-2'-fluorouridine-3'-phosphorothioate
  modified_base 3: mod_base = OTHER; note = 2'-O-methyluridine-3'-phosphate
  modified_base 4: mod_base = OTHER; note = 2'-O-methyluridine-3'-phosphate
  modified_base 5: mod_base = OTHER; note = 2'-O-methylguanosine-3'-phosphate
  modified_base 6: mod_base = OTHER; note = 2'-deoxy-2'-fluoroguanosine-3'-phosphate
  modified_base 7: mod_base = OTHER; note = 2'-O-methyladenosine-3'-phosphate
  modified_base 8: mod_base = OTHER; note = 2'-deoxy-2'-fluoroadenosine-3'-phosphate
  modified_base 9: mod_base = OTHER; note = 2'-deoxy-2'-fluorouridine-3'-phosphate
  modified_base 10: mod_base = OTHER; note = 2'-O-methyladenosine-3'-phosphate
  modified_base 11: mod_base = OTHER; note = 2'-O-methyluridine-3'-phosphate
  modified_base 12: mod_base = OTHER; note = 2'-O-methylguanosine-3'-phosphate
  modified_base 13: mod_base = OTHER; note = 2'-O-methyladenosine-3'-phosphate
  modified_base 14: mod_base = OTHER; note = 2'-deoxy-2'-fluoroadenosine-3'-phosphate
  modified_base 15: mod_base = OTHER; note = 2'-O-methyladenosine-3'-phosphate
  modified_base 16: mod_base = OTHER; note = 2'-deoxy-2'-fluoroadenosine-3'-phosphate
  modified_base 17: mod_base = OTHER; note = 2'-O-methylcytidine-3'-phosphate
  modified_base 18: mod_base = OTHER; note = 2'-O-methylcytidine-3'-phosphate
  modified_base 19: mod_base = OTHER; note = 2'-O-methylguanosine-3'-phosphate
  modified_base 20: mod_base = OTHER; note = 2'-O-methyladenosine-3'-phosphate
  modified_base 21: mod_base = OTHER; note = 2'-O-methyladenosine-3'-phosphorothioate
  modified_base 22: mod_base = OTHER; note = 2'-O-methyladenosine-3'-phosphorothioate
  modified_base 23: mod_base = OTHER; note = 2'-O-methyladenosine
atttggaatatgaaaaccgaaaa

SEQ ID NO: 462 - RNA, 23 nt, synthetic construct
  source 1..23: mol_type = other RNA
  modified_base 1: mod_base = OTHER; note = 2'-O-methyladenosine-3'-phosphorothioate
  modified_base 2: mod_base = OTHER; note = 2'-deoxy-2'-fluoroadenosine-3'-phosphorothioate
  modified_base 3: mod_base = OTHER; note = 2'-O-methylguanosine-3'-phosphate
  modified_base 4: mod_base = OTHER; note = 2'-O-methyladenosine-3'-phosphate
  modified_base 5: mod_base = OTHER; note = 2'-O-methyladenosine-3'-phosphate
  modified_base 6: mod_base = OTHER; note = 2'-deoxy-2'-fluorouridine-3'-phosphate
  modified_base 7: mod_base = OTHER; note = 2'-O-methyladenosine-3'-phosphate
  modified_base 8: mod_base = OTHER; note = 2'-deoxy-2'-fluorouridine-3'-phosphate
  modified_base 9: mod_base = OTHER; note = 2'-deoxy-2'-fluoroguanosine-3'-phosphate
  modified_base 10: mod_base = OTHER; note = 2'-O-methyladenosine-3'-phosphate
  modified_base 11: mod_base = OTHER; note = 2'-O-methylcytidine-3'-phosphate
  modified_base 12: mod_base = OTHER; note = 2'-O-methyladenosine-3'-phosphate
  modified_base 13: mod_base = OTHER; note = 2'-O-methyladenosine-3'-phosphate
  modified_base 14: mod_base = OTHER; note = 2'-deoxy-2'-fluoroadenosine-3'-phosphate
  modified_base 15: mod_base = OTHER; note = 2'-O-methyladenosine-3'-phosphate
  modified_base 16: mod_base = OTHER; note = 2'-deoxy-2'-fluoroadenosine-3'-phosphate
  modified_base 17: mod_base = OTHER; note = 2'-O-methyluridine-3'-phosphate
  modified_base 18: mod_base = OTHER; note = 2'-O-methyladenosine-3'-phosphate
  modified_base 19: mod_base = OTHER; note = 2'-O-methylguanosine-3'-phosphate
  modified_base 20: mod_base = OTHER; note = 2'-O-methyluridine-3'-phosphate
  modified_base 21: mod_base = OTHER; note = 2'-O-methyluridine-3'-phosphorothioate
  modified_base 22: mod_base = OTHER; note = 2'-O-methylguanosine-3'-phosphorothioate
  modified_base 23: mod_base = OTHER; note = 2'-O-methylguanosine
aagaatatgacaaaaatagttgg

SEQ ID NO: 463 - RNA, 23 nt, synthetic construct
  source 1..23: mol_type = other RNA
  modified_base 1: mod_base = OTHER; note = 2'-O-methyladenosine-3'-phosphorothioate
  modified_base 2: mod_base = OTHER; note = 2'-deoxy-2'-fluorouridine-3'-phosphorothioate
  modified_base 3: mod_base = OTHER; note = 2'-O-methyluridine-3'-phosphate
  modified_base 4: mod_base = OTHER; note = 2'-O-methyluridine-3'-phosphate
  modified_base 5: mod_base = OTHER; note = 2'-O-methylcytidine-3'-phosphate
  modified_base 6: mod_base = OTHER; note = 2'-deoxy-2'-fluorocytidine-3'-phosphate
  modified_base 7: mod_base = OTHER; note = 2'-O-methyluridine-3'-phosphate
  modified_base 8: mod_base = OTHER; note = 2'-deoxy-2'-fluorouridine-3'-phosphate
  modified_base 9: mod_base = OTHER; note = 2'-deoxy-2'-fluorocytidine-3'-phosphate
  modified_base 10: mod_base = OTHER; note = 2'-O-methyluridine-3'-phosphate
  modified_base 11: mod_base = OTHER; note = 2'-O-methyluridine-3'-phosphate
  modified_base 12: mod_base = OTHER; note = 2'-O-methyluridine-3'-phosphate
  modified_base 13: mod_base = OTHER; note = 2'-O-methylguanosine-3'-phosphate
  modified_base 14: mod_base = OTHER; note = 2'-deoxy-2'-fluoroadenosine-3'-phosphate
  modified_base 15: mod_base = OTHER; note = 2'-O-methyladenosine-3'-phosphate
  modified_base 16: mod_base = OTHER; note = 2'-deoxy-2'-fluoroguanosine-3'-phosphate
  modified_base 17: mod_base = OTHER; note = 2'-O-methyladenosine-3'-phosphate
  modified_base 18: mod_base = OTHER; note = 2'-O-methyladenosine-3'-phosphate
  modified_base 19: mod_base = OTHER; note = 2'-O-methyluridine-3'-phosphate
  modified_base 20: mod_base = OTHER; note = 2'-O-methyladenosine-3'-phosphate
  modified_base 21: mod_base = OTHER; note = 2'-O-methyluridine-3'-phosphorothioate
  modified_base 22: mod_base = OTHER; note = 2'-O-methylguanosine-3'-phosphorothioate
  modified_base 23: mod_base = OTHER; note = 2'-O-methyladenosine
atttccttctttgaagaatatga

SEQ ID NO: 464 - RNA, 23 nt, synthetic construct
  source 1..23: mol_type = other RNA
  modified_base 1: mod_base = OTHER; note = 2'-O-methyladenosine-3'-phosphorothioate
  modified_base 2: mod_base = OTHER; note = 2'-deoxy-2'-fluorocytidine-3'-phosphorothioate
  modified_base 3: mod_base = OTHER; note = 2'-O-methylcytidine-3'-phosphate
  modified_base 4: mod_base = OTHER; note = 2'-O-methyluridine-3'-phosphate
  modified_base 5: mod_base = OTHER; note = 2'-O-methyluridine-3'-phosphate
  modified_base 6: mod_base = OTHER; note = 2'-deoxy-2'-fluorouridine-3'-phosphate
  modified_base 7: mod_base = OTHER; note = 2'-O-methylcytidine-3'-phosphate
  modified_base 8: mod_base = OTHER; note = 2'-deoxy-2'-fluoroadenosine-3'-phosphate
  modified_base 9: mod_base = OTHER; note = 2'-deoxy-2'-fluorocytidine-3'-phosphate
  modified_base 10: mod_base = OTHER; note = 2'-O-methyladenosine-3'-phosphate
  modified_base 11: mod_base = OTHER; note = 2'-O-methyluridine-3'-phosphate
  modified_base 12: mod_base = OTHER; note = 2'-O-methylguanosine-3'-phosphate
  modified_base 13: mod_base = OTHER; note = 2'-O-methylcytidine-3'-phosphate
  modified_base 14: mod_base = OTHER; note = 2'-deoxy-2'-fluoroadenosine-3'-phosphate
  modified_base 15: mod_base = OTHER; note = 2'-O-methylguanosine-3'-phosphate
  modified_base 16: mod_base = OTHER; note = 2'-deoxy-2'-fluoroadenosine-3'-phosphate
  modified_base 17: mod_base = OTHER; note = 2'-O-methyladenosine-3'-phosphate
  modified_base 18: mod_base = OTHER; note = 2'-O-methyladenosine-3'-phosphate
  modified_base 19: mod_base = OTHER; note = 2'-O-methylcytidine-3'-phosphate
  modified_base 20: mod_base = OTHER; note = 2'-O-methyladenosine-3'-phosphate
  modified_base 21: mod_base = OTHER; note = 2'-O-methyluridine-3'-phosphorothioate
  modified_base 22: mod_base = OTHER; note = 2'-O-methyluridine-3'-phosphorothioate
  modified_base 23: mod_base = OTHER; note = 2'-O-methyluridine
acctttcacatgcagaaacattt

SEQ ID NO: 465 - RNA, 23 nt, synthetic construct
  source 1..23: mol_type = other RNA
  modified_base 1: mod_base = OTHER; note = 2'-O-methyladenosine-3'-phosphorothioate
  modified_base 2: mod_base = OTHER; note = 2'-deoxy-2'-fluorocytidine-3'-phosphorothioate
  modified_base 3: mod_base = OTHER; note = 2'-O-methyladenosine-3'-phosphate
  modified_base 4: mod_base = OTHER; note = 2'-O-methylguanosine-3'-phosphate
  modified_base 5: mod_base = OTHER; note = 2'-O-methyladenosine-3'-phosphate
  modified_base 6: mod_base = OTHER; note = 2'-deoxy-2'-fluorouridine-3'-phosphate
  modified_base 7: mod_base = OTHER; note = 2'-O-methylguanosine-3'-phosphate
  modified_base 8: mod_base = OTHER; note = 2'-deoxy-2'-fluoroadenosine-3'-phosphate
  modified_base 9: mod_base = OTHER; note = 2'-deoxy-2'-fluoroadenosine-3'-phosphate
  modified_base 10: mod_base = OTHER; note = 2'-O-methyluridine-3'-phosphate
  modified_base 11: mod_base = OTHER; note = 2'-O-methyluridine-3'-phosphate
  modified_base 12: mod_base = OTHER; note = 2'-O-methyluridine-3'-phosphate
  modified_base 13: mod_base = OTHER; note = 2'-O-methylcytidine-3'-phosphate
  modified_base 14: mod_base = OTHER; note = 2'-deoxy-2'-fluorouridine-3'-phosphate
  modified_base 15: mod_base = OTHER; note = 2'-O-methylcytidine-3'-phosphate
  modified_base 16: mod_base = OTHER; note = 2'-deoxy-2'-fluorocytidine-3'-phosphate
  modified_base 17: mod_base = OTHER; note = 2'-O-methyluridine-3'-phosphate
  modified_base 18: mod_base = OTHER; note = 2'-O-methyluridine-3'-phosphate
  modified_base 19: mod_base = OTHER; note = 2'-O-methyluridine-3'-phosphate
  modified_base 20: mod_base = OTHER; note = 2'-O-methylcytidine-3'-phosphate
  modified_base 21: mod_base = OTHER; note = 2'-O-methyladenosine-3'-phosphorothioate
  modified_base 22: mod_base = OTHER; note = 2'-O-methylcytidine-3'-phosphorothioate
  modified_base 23: mod_base = OTHER; note = 2'-O-methyladenosine
acagatgaatttctcctttcaca

SEQ ID NO: 466 - RNA, 23 nt, synthetic construct
  source 1..23: mol_type = other RNA
  modified_base 1: mod_base = OTHER; note = 2'-O-methyladenosine-3'-phosphorothioate
  modified_base 2: mod_base = OTHER; note = 2'-deoxy-2'-fluorouridine-3'-phosphorothioate
  modified_base 3: mod_base = OTHER; note = 2'-O-methylcytidine-3'-phosphate
  modified_base 4: mod_base = OTHER; note = 2'-O-methyladenosine-3'-phosphate
  modified_base 5: mod_base = OTHER; note = 2'-O-methyluridine-3'-phosphate
  modified_base 6: mod_base = OTHER; note = 2'-deoxy-2'-fluorouridine-3'-phosphate
  modified_base 7: mod_base = OTHER; note = 2'-O-methyladenosine-3'-phosphate
  modified_base 8: mod_base = OTHER; note = 2'-deoxy-2'-fluorocytidine-3'-phosphate
  modified_base 9: mod_base = OTHER; note = 2'-deoxy-2'-fluoroadenosine-3'-phosphate
  modified_base 10: mod_base = OTHER; note = 2'-O-methyladenosine-3'-phosphate
  modified_base 11: mod_base = OTHER; note = 2'-O-methyladenosine-3'-phosphate
  modified_base 12: mod_base = OTHER; note = 2'-O-methyluridine-3'-phosphate
  modified_base 13: mod_base = OTHER; note = 2'-O-methylcytidine-3'-phosphate
  modified_base 14: mod_base = OTHER; note = 2'-deoxy-2'-fluorouridine-3'-phosphate
  modified_base 15: mod_base = OTHER; note = 2'-O-methyluridine-3'-phosphate
  modified_base 16: mod_base = OTHER; note = 2'-deoxy-2'-fluorocytidine-3'-phosphate
  modified_base 17: mod_base = OTHER; note = 2'-O-methylcytidine-3'-phosphate
  modified_base 18: mod_base = OTHER; note = 2'-O-methylcytidine-3'-phosphate
  modified_base 19: mod_base = OTHER; note = 2'-O-methyladenosine-3'-phosphate
  modified_base 20: mod_base = OTHER; note = 2'-O-methylguanosine-3'-phosphate
  modified_base 21: mod_base = OTHER; note = 2'-O-methyladenosine-3'-phosphorothioate
  modified_base 22: mod_base = OTHER; note = 2'-O-methyluridine-3'-phosphorothioate
  modified_base 23: mod_base = OTHER; note = 2'-O-methylguanosine
atcattacaaatcttcccagatg

SEQ ID NO: 467 - RNA, 23 nt, synthetic construct
  source 1..23: mol_type = other RNA
  modified_base 1: mod_base = OTHER; note = 2'-O-methyladenosine-3'-phosphorothioate
  modified_base 2: mod_base = OTHER; note = 2'-deoxy-2'-fluorocytidine-3'-phosphorothioate
  modified_base 3: mod_base = OTHER; note = 2'-O-methyladenosine-3'-phosphate
  modified_base 4: mod_base = OTHER; note = 2'-O-methyluridine-3'-phosphate
  modified_base 5: mod_base = OTHER; note = 2'-O-methylcytidine-3'-phosphate
  modified_base 6: mod_base = OTHER; note = 2'-deoxy-2'-fluoroguanosine-3'-phosphate
  modified_base 7: mod_base = OTHER; note = 2'-O-methylcytidine-3'-phosphate
  modified_base 8: mod_base = OTHER; note = 2'-deoxy-2'-fluoroguanosine-3'-phosphate
  modified_base 9: mod_base = OTHER; note = 2'-deoxy-2'-fluoroadenosine-3'-phosphate
  modified_base 10: mod_base = OTHER; note = 2'-O-methyluridine-3'-phosphate
  modified_base 11: mod_base = OTHER; note = 2'-O-methyluridine-3'-phosphate
  modified_base 12: mod_base = OTHER; note = 2'-O-methyluridine-3'-phosphate
  modified_base 13: mod_base = OTHER; note = 2'-O-methylcytidine-3'-phosphate
  modified_base 14: mod_base = OTHER; note = 2'-deoxy-2'-fluorouridine-3'-phosphate
  modified_base 15: mod_base = OTHER; note = 2'-O-methylcytidine-3'-phosphate
  modified_base 16: mod_base = OTHER; note = 2'-deoxy-2'-fluoroadenosine-3'-phosphate
  modified_base 17: mod_base = OTHER; note = 2'-O-methyluridine-3'-phosphate
  modified_base 18: mod_base = OTHER; note = 2'-O-methyluridine-3'-phosphate
  modified_base 19: mod_base = OTHER; note = 2'-O-methyladenosine-3'-phosphate
  modified_base 20: mod_base = OTHER; note = 2'-O-methylcytidine-3'-phosphate
  modified_base 21: mod_base = OTHER; note = 2'-O-methyladenosine-3'-phosphorothioate
  modified_base 22: mod_base = OTHER; note = 2'-O-methyladenosine-3'-phosphorothioate
  modified_base 23: mod_base = OTHER; note = 2'-O-methyladenosine
acatcgcgatttctcattacaaa

SEQ ID NO: 468 - RNA, 23 nt, synthetic construct
  source 1..23: mol_type = other RNA
  modified_base 1: mod_base = OTHER; note = 2'-O-methyladenosine-3'-phosphorothioate
  modified_base 2: mod_base = OTHER; note = 2'-deoxy-2'-fluorouridine-3'-phosphorothioate
  modified_base 3: mod_base = OTHER; note = 2'-O-methyluridine-3'-phosphate
  modified_base 4: mod_base = OTHER; note = 2'-O-methylguanosine-3'-phosphate
  modified_base 5: mod_base = OTHER; note = 2'-O-methyluridine-3'-phosphate
  modified_base 6: mod_base = OTHER; note = 2'-deoxy-2'-fluoroguanosine-3'-phosphate
  modified_base 7: mod_base = OTHER; note = 2'-O-methyladenosine-3'-phosphate
  modified_base 8: mod_base = OTHER; note = 2'-deoxy-2'-fluoroguanosine-3'-phosphate
  modified_base 9: mod_base = OTHER; note = 2'-deoxy-2'-fluorocytidine-3'-phosphate
  modified_base 10: mod_base = OTHER; note = 2'-O-methyladenosine-3'-phosphate
  modified_base 11: mod_base = OTHER; note = 2'-O-methylcytidine-3'-phosphate
  modified_base 12: mod_base = OTHER; note = 2'-O-methyladenosine-3'-phosphate
  modified_base 13: mod_base = OTHER; note = 2'-O-methyladenosine-3'-phosphate
  modified_base 14: mod_base = OTHER; note = 2'-deoxy-2'-fluorocytidine-3'-phosphate
  modified_base 15: mod_base = OTHER; note = 2'-O-methyladenosine-3'-phosphate
  modified_base 16: mod_base = OTHER; note = 2'-deoxy-2'-fluorouridine-3'-phosphate
  modified_base 17: mod_base = OTHER; note = 2'-O-methylcytidine-3'-phosphate
  modified_base 18: mod_base = OTHER; note = 2'-O-methylguanosine-3'-phosphate
  modified_base 19: mod_base = OTHER; note = 2'-O-methylcytidine-3'-phosphate
  modified_base 20: mod_base = OTHER; note = 2'-O-methylguanosine-3'-phosphate
  modified_base 21: mod_base = OTHER; note = 2'-O-methyladenosine-3'-phosphorothioate
  modified_base 22: mod_base = OTHER; note = 2'-O-methyluridine-3'-phosphorothioate
  modified_base 23: mod_base = OTHER; note = 2'-O-methyluridine
attgtgagcacaacatcgcgatt

SEQ ID NO: 469 - RNA, 23 nt, synthetic construct
  source 1..23: mol_type = other RNA
  modified_base 1: mod_base = OTHER; note = 2'-O-methyladenosine-3'-phosphorothioate
  modified_base 2: mod_base = OTHER; note = 2'-deoxy-2'-fluoroadenosine-3'-phosphorothioate
  modified_base 3: mod_base = OTHER; note = 2'-O-methyluridine-3'-phosphate
  modified_base 4: mod_base = OTHER; note = 2'-O-methylcytidine-3'-phosphate
  modified_base 5: mod_base = OTHER; note = 2'-O-methylcytidine-3'-phosphate
  modified_base 6: mod_base = OTHER; note = 2'-deoxy-2'-fluoroadenosine-3'-phosphate
  modified_base 7: mod_base = OTHER; note = 2'-O-methylcytidine-3'-phosphate
  modified_base 8: mod_base = OTHER; note = 2'-deoxy-2'-fluoroadenosine-3'-phosphate
  modified_base 9: mod_base = OTHER; note = 2'-deoxy-2'-fluoroadenosine-3'-phosphate
  modified_base 10: mod_base = OTHER; note = 2'-O-methyladenosine-3'-phosphate
  modified_base 11: mod_base = OTHER; note = 2'-O-methyladenosine-3'-phosphate
  modified_base 12: mod_base = OTHER; note = 2'-O-methylguanosine-3'-phosphate
  modified_base 13: mod_base = OTHER; note = 2'-O-methyluridine-3'-phosphate
  modified_base 14: mod_base = OTHER; note = 2'-deoxy-2'-fluorouridine-3'-phosphate
  modified_base 15: mod_base = OTHER; note = 2'-O-methylguanosine-3'-phosphate
  modified_base 16: mod_base = OTHER; note = 2'-deoxy-2'-fluorouridine-3'-phosphate
  modified_base 17: mod_base = OTHER; note = 2'-O-methyluridine-3'-phosphate
  modified_base 18: mod_base = OTHER; note = 2'-O-methylguanosine-3'-phosphate
  modified_base 19: mod_base = OTHER; note = 2'-O-methyluridine-3'-phosphate
  modified_base 20: mod_base = OTHER; note = 2'-O-methylguanosine-3'-phosphate
  modified_base 21: mod_base = OTHER; note = 2'-O-methyladenosine-3'-phosphorothioate
  modified_base 22: mod_base = OTHER; note = 2'-O-methylguanosine-3'-phosphorothioate
  modified_base 23: mod_base = OTHER; note = 2'-O-methylcytidine
aatccacaaaagttgttgtgagc

SEQ ID NO: 470 - RNA, 23 nt, synthetic construct
  source 1..23: mol_type = other RNA
  modified_base 1: mod_base = OTHER; note = 2'-O-methyladenosine-3'-phosphorothioate
  modified_base 2: mod_base = OTHER; note = 2'-deoxy-2'-fluoroadenosine-3'-phosphorothioate
  modified_base 3: mod_base = OTHER; note = 2'-O-methyladenosine-3'-phosphate
  modified_base 4: mod_base = OTHER; note = 2'-O-methyladenosine-3'-phosphate
  modified_base 5: mod_base = OTHER; note = 2'-O-methylguanosine-3'-phosphate
  modified_base 6: mod_base = OTHER; note = 2'-deoxy-2'-fluorocytidine-3'-phosphate
  modified_base 7: mod_base = OTHER; note = 2'-O-methyluridine-3'-phosphate
  modified_base 8: mod_base = OTHER; note = 2'-deoxy-2'-fluorouridine-3'-phosphate
  modified_base 9: mod_base = OTHER; note = 2'-deoxy-2'-fluorouridine-3'-phosphate
  modified_base 10: mod_base = OTHER; note = 2'-O-methyluridine-3'-phosphate
  modified_base 11: mod_base = OTHER; note = 2'-O-methyladenosine-3'-phosphate
  modified_base 12: mod_base = OTHER; note = 2'-O-methyluridine-3'-phosphate
  modified_base 13: mod_base = OTHER; note = 2'-O-methyladenosine-3'-phosphate
  modified_base 14: mod_base = OTHER; note = 2'-deoxy-2'-fluorouridine-3'-phosphate
  modified_base 15: mod_base = OTHER; note = 2'-O-methylcytidine-3'-phosphate
  modified_base 16: mod_base = OTHER; note = 2'-deoxy-2'-fluoroadenosine-3'-phosphate
  modified_base 17: mod_base = OTHER; note = 2'-O-methyluridine-3'-phosphate
  modified_base 18: mod_base = OTHER; note = 2'-O-methylcytidine-3'-phosphate
  modified_base 19: mod_base = OTHER; note = 2'-O-methylcytidine-3'-phosphate
  modified_base 20: mod_base = OTHER; note = 2'-O-methyladenosine-3'-phosphate
  modified_base 21: mod_base = OTHER; note = 2'-O-methylcytidine-3'-phosphorothioate
  modified_base 22: mod_base = OTHER; note = 2'-O-methyladenosine-3'-phosphorothioate
  modified_base 23: mod_base = OTHER; note = 2'-O-methyladenosine
aaaagcttttatatcatccacaa

SEQ ID NO: 471 - RNA, 23 nt, synthetic construct
  source 1..23: mol_type = other RNA
  modified_base 1: mod_base = OTHER; note = 2'-O-methyladenosine-3'-phosphorothioate
  modified_base 2: mod_base = OTHER; note = 2'-deoxy-2'-fluoroadenosine-3'-phosphorothioate
  modified_base 3: mod_base = OTHER; note = 2'-O-methyluridine-3'-phosphate
  modified_base 4: mod_base = OTHER; note = 2'-O-methyladenosine-3'-phosphate
  modified_base 5: mod_base = OTHER; note = 2'-O-methylguanosine-3'-phosphate
  modified_base 6: mod_base = OTHER; note = 2'-deoxy-2'-fluoroguanosine-3'-phosphate
  modified_base 7: mod_base = OTHER; note = 2'-O-methyluridine-3'-phosphate
  modified_base 8: mod_base = OTHER; note = 2'-deoxy-2'-fluoroadenosine-3'-phosphate
  modified_base 9: mod_base = OTHER; note = 2'-deoxy-2'-fluoroguanosine-3'-phosphate
  modified_base 10: mod_base = OTHER; note = 2'-O-methyluridine-3'-phosphate
  modified_base 11: mod_base = OTHER; note = 2'-O-methyluridine-3'-phosphate
  modified_base 12: mod_base = OTHER; note = 2'-O-methylguanosine-3'-phosphate
  modified_base 13: mod_base = OTHER; note = 2'-O-methylguanosine-3'-phosphate
  modified_base 14: mod_base = OTHER; note = 2'-deoxy-2'-fluorocytidine-3'-phosphate
  modified_base 15: mod_base = OTHER; note = 2'-O-methyladenosine-3'-phosphate
  modified_base 16: mod_base = OTHER; note = 2'-deoxy-2'-fluoroadenosine-3'-phosphate
  modified_base 17: mod_base = OTHER; note = 2'-O-methyladenosine-3'-phosphate
  modified_base 18: mod_base = OTHER; note = 2'-O-methylguanosine-3'-phosphate
  modified_base 19: mod_base = OTHER; note = 2'-O-methylcytidine-3'-phosphate
  modified_base 20: mod_base = OTHER; note = 2'-O-methyluridine-3'-phosphate
  modified_base 21: mod_base = OTHER; note = 2'-O-methyluridine-3'-phosphorothioate
  modified_base 22: mod_base = OTHER; note = 2'-O-methyluridine-3'-phosphorothioate
  modified_base 23: mod_base = OTHER; note = 2'-O-methyluridine
aataggtagttggcaaagctttt

SEQ ID NO: 472 - RNA, 23 nt, synthetic construct
  source 1..23: mol_type = other RNA
  modified_base 1: mod_base = OTHER; note = 2'-O-methyladenosine-3'-phosphorothioate
  modified_base 2: mod_base = OTHER; note = 2'-deoxy-2'-fluoroadenosine-3'-phosphorothioate
  modified_base 3: mod_base = OTHER; note = 2'-O-methyluridine-3'-phosphate
  modified_base 4: mod_base = OTHER; note = 2'-O-methyluridine-3'-phosphate
  modified_base 5: mod_base = OTHER; note = 2'-O-methylcytidine-3'-phosphate
  modified_base 6: mod_base = OTHER; note = 2'-deoxy-2'-fluorouridine-3'-phosphate
  modified_base 7: mod_base = OTHER; note = 2'-O-methylcytidine-3'-phosphate
  modified_base 8: mod_base = OTHER; note = 2'-deoxy-2'-fluorocytidine-3'-phosphate
  modified_base 9: mod_base = OTHER; note = 2'-deoxy-2'-fluorocytidine-3'-phosphate
  modified_base 10: mod_base = OTHER; note = 2'-O-methyluridine-3'-phosphate
  modified_base 11: mod_base = OTHER; note = 2'-O-methyluridine-3'-phosphate
  modified_base 12: mod_base = OTHER; note = 2'-O-methyluridine-3'-phosphate
  modified_base 13: mod_base = OTHER; note = 2'-O-methyluridine-3'-phosphate
  modified_base 14: mod_base = OTHER; note = 2'-deoxy-2'-fluorocytidine-3'-phosphate
  modified_base 15: mod_base = OTHER; note = 2'-O-methyladenosine-3'-phosphate
  modified_base 16: mod_base = OTHER; note = 2'-deoxy-2'-fluorouridine-3'-phosphate
  modified_base 17: mod_base = OTHER; note = 2'-O-methyladenosine-3'-phosphate
  modified_base 18: mod_base = OTHER; note = 2'-O-methylguanosine-3'-phosphate
  modified_base 19: mod_base = OTHER; note = 2'-O-methylguanosine-3'-phosphate
  modified_base 20: mod_base = OTHER; note = 2'-O-methyluridine-3'-phosphate
  modified_base 21: mod_base = OTHER; note = 2'-O-methyladenosine-3'-phosphorothioate
  modified_base 22: mod_base = OTHER; note = 2'-O-methylguanosine-3'-phosphorothioate
  modified_base 23: mod_base = OTHER; note = 2'-O-methyluridine
aattctcccttttcataggtagt

SEQ ID NO: 473 - RNA, 23 nt, synthetic construct
  source 1..23: mol_type = other RNA
  modified_base 1: mod_base = OTHER; note = 2'-O-methyladenosine-3'-phosphorothioate
  modified_base 2: mod_base = OTHER; note = 2'-deoxy-2'-fluoroadenosine-3'-phosphorothioate
  modified_base 3: mod_base = OTHER; note = 2'-O-methyluridine-3'-phosphate
  modified_base 4: mod_base = OTHER; note = 2'-O-methyladenosine-3'-phosphate
  modified_base 5: mod_base = OTHER; note = 2'-O-methylguanosine-3'-phosphate
  modified_base 6: mod_base = OTHER; note = 2'-deoxy-2'-fluoroguanosine-3'-phosphate
  modified_base 7: mod_base = OTHER; note = 2'-O-methyluridine-3'-phosphate
  modified_base 8: mod_base = OTHER; note = 2'-deoxy-2'-fluorouridine-3'-phosphate
  modified_base 9: mod_base = OTHER; note = 2'-deoxy-2'-fluorouridine-3'-phosphate
  modified_base 10: mod_base = OTHER; note = 2'-O-methylcytidine-3'-phosphate
  modified_base 11: mod_base = OTHER; note = 2'-O-methylcytidine-3'-phosphate
  modified_base 12: mod_base = OTHER; note = 2'-O-methyladenosine-3'-phosphate
  modified_base 13: mod_base = OTHER; note = 2'-O-methyladenosine-3'-phosphate
  modified_base 14: mod_base = OTHER; note = 2'-deoxy-2'-fluoroadenosine-3'-phosphate
  modified_base 15: mod_base = OTHER; note = 2'-O-methyladenosine-3'-phosphate
  modified_base 16: mod_base = OTHER; note = 2'-deoxy-2'-fluoroadenosine-3'-phosphate
  modified_base 17: mod_base = OTHER; note = 2'-O-methylguanosine-3'-phosphate
  modified_base 18: mod_base = OTHER; note = 2'-O-methylguanosine-3'-phosphate
  modified_base 19: mod_base = OTHER; note = 2'-O-methylcytidine-3'-phosphate
  modified_base 20: mod_base = OTHER; note = 2'-O-methyladenosine-3'-phosphate
  modified_base 21: mod_base = OTHER; note = 2'-O-methyladenosine-3'-phosphorothioate
  modified_base 22: mod_base = OTHER; note = 2'-O-methyladenosine-3'-phosphorothioate
  modified_base 23: mod_base = OTHER; note = 2'-O-methyladenosine
aataggtttccaaaaaggcaaaa

SEQ ID NO: 474 - RNA, 23 nt, synthetic construct
  source 1..23: mol_type = other RNA
  modified_base 1: mod_base = OTHER; note = 2'-O-methyladenosine-3'-phosphorothioate
  modified_base 2: mod_base = OTHER; note = 2'-deoxy-2'-fluoroadenosine-3'-phosphorothioate
  modified_base 3: mod_base = OTHER; note = 2'-O-methylcytidine-3'-phosphate
  modified_base 4: mod_base = OTHER; note = 2'-O-methyluridine-3'-phosphate
  modified_base 5: mod_base = OTHER; note = 2'-O-methylguanosine-3'-phosphate
  modified_base 6: mod_base = OTHER; note = 2'-deoxy-2'-fluorouridine-3'-phosphate
  modified_base 7: mod_base = OTHER; note = 2'-O-methyladenosine-3'-phosphate
  modified_base 8: mod_base = OTHER; note = 2'-deoxy-2'-fluoroguanosine-3'-phosphate
  modified_base 9: mod_base = OTHER; note = 2'-deoxy-2'-fluorouridine-3'-phosphate
  modified_base 10: mod_base = OTHER; note = 2'-O-methylguanosine-3'-phosphate
  modified_base 11: mod_base = OTHER; note = 2'-O-methyladenosine-3'-phosphate
  modified_base 12: mod_base = OTHER; note = 2'-O-methylguanosine-3'-phosphate
  modified_base 13: mod_base = OTHER; note = 2'-O-methyluridine-3'-phosphate
  modified_base 14: mod_base = OTHER; note = 2'-deoxy-2'-fluorouridine-3'-phosphate
  modified_base 15: mod_base = OTHER; note = 2'-O-methylcytidine-3'-phosphate
  modified_base 16: mod_base = OTHER; note = 2'-deoxy-2'-fluorocytidine-3'-phosphate
  modified_base 17: mod_base = OTHER; note = 2'-O-methyladenosine-3'-phosphate
  modified_base 18: mod_base = OTHER; note = 2'-O-methyluridine-3'-phosphate
  modified_base 19: mod_base = OTHER; note = 2'-O-methyladenosine-3'-phosphate
  modified_base 20: mod_base = OTHER; note = 2'-O-methylguanosine-3'-phosphate
  modified_base 21: mod_base = OTHER; note = 2'-O-methylguanosine-3'-phosphorothioate
  modified_base 22: mod_base = OTHER; note = 2'-O-methyluridine-3'-phosphorothioate
  modified_base 23: mod_base = OTHER; note = 2'-O-methyluridine
aactgtagtgagttccataggtt

SEQ ID NO: 475 - RNA, 23 nt, synthetic construct
  source 1..23: mol_type = other RNA
  modified_base 1: mod_base = OTHER; note = 2'-O-methyladenosine-3'-phosphorothioate
  modified_base 2: mod_base = OTHER; note = 2'-deoxy-2'-fluoroadenosine-3'-phosphorothioate
  modified_base 3: mod_base = OTHER; note = 2'-O-methylguanosine-3'-phosphate
  modified_base 4: mod_base = OTHER; note = 2'-O-methyladenosine-3'-phosphate
  modified_base 5: mod_base = OTHER; note = 2'-O-methylcytidine-3'-phosphate
  modified_base 6: mod_base = OTHER; note = 2'-deoxy-2'-fluorocytidine-3'-phosphate
  modified_base 7: mod_base = OTHER; note = 2'-O-methylcytidine-3'-phosphate
  modified_base 8: mod_base = OTHER; note = 2'-deoxy-2'-fluoroadenosine-3'-phosphate
  modified_base 9: mod_base = OTHER; note = 2'-deoxy-2'-fluoroguanosine-3'-phosphate
  modified_base 10: mod_base = OTHER; note = 2'-O-methyladenosine-3'-phosphate
  modified_base 11: mod_base = OTHER; note = 2'-O-methylguanosine-3'-phosphate
  modified_base 12: mod_base = OTHER; note = 2'-O-methylcytidine-3'-phosphate
  modified_base 13: mod_base = OTHER; note = 2'-O-methyluridine-3'-phosphate
  modified_base 14: mod_base = OTHER; note = 2'-deoxy-2'-fluoroadenosine-3'-phosphate
  modified_base 15: mod_base = OTHER; note = 2'-O-methylcytidine-3'-phosphate
  modified_base 16: mod_base = OTHER; note = 2'-deoxy-2'-fluorouridine-3'-phosphate
  modified_base 17: mod_base = OTHER; note = 2'-O-methylguanosine-3'-phosphate
  modified_base 18: mod_base = OTHER; note = 2'-O-methyluridine-3'-phosphate
  modified_base 19: mod_base = OTHER; note = 2'-O-methyladenosine-3'-phosphate
  modified_base 20: mod_base = OTHER; note = 2'-O-methylguanosine-3'-phosphate
  modified_base 21: mod_base = OTHER; note = 2'-O-methyluridine-3'-phosphorothioate
  modified_base 22: mod_base = OTHER; note = 2'-O-methylguanosine-3'-phosphorothioate
  modified_base 23: mod_base = OTHER; note = 2'-O-methyladenosine
aagacccagagctactgtagtga

SEQ ID NO: 476 - RNA, 23 nt, synthetic construct
  source 1..23: mol_type = other RNA
  modified_base 1: mod_base = OTHER; note = 2'-O-methyladenosine-3'-phosphorothioate
  modified_base 2: mod_base = OTHER; note = 2'-deoxy-2'-fluoroguanosine-3'-phosphorothioate
  modified_base 3: mod_base = OTHER; note = 2'-O-methyladenosine-3'-phosphate
  modified_base 4: mod_base = OTHER; note = 2'-O-methylguanosine-3'-phosphate
  modified_base 5: mod_base = OTHER; note = 2'-O-methyluridine-3'-phosphate
  modified_base 6: mod_base = OTHER; note = 2'-deoxy-2'-fluorocytidine-3'-phosphate
  modified_base 7: mod_base = OTHER; note = 2'-O-methylcytidine-3'-phosphate
  modified_base 8: mod_base = OTHER; note = 2'-deoxy-2'-fluorouridine-3'-phosphate
  modified_base 9: mod_base = OTHER; note = 2'-deoxy-2'-fluorocytidine-3'-phosphate
  modified_base 10: mod_base = OTHER; note = 2'-O-methylcytidine-3'-phosphate
  modified_base 11: mod_base = OTHER; note = 2'-O-methyluridine-3'-phosphate
  modified_base 12: mod_base = OTHER; note = 2'-O-methyladenosine-3'-phosphate
  modified_base 13: mod_base = OTHER; note = 2'-O-methylguanosine-3'-phosphate
  modified_base 14: mod_base = OTHER; note = 2'-deoxy-2'-fluoroadenosine-3'-phosphate
  modified_base 15: mod_base = OTHER; note = 2'-O-methylguanosine-3'-phosphate
  modified_base 16: mod_base = OTHER; note = 2'-deoxy-2'-fluoroadenosine-3'-phosphate
  modified_base 17: mod_base = OTHER; note = 2'-O-methylcytidine-3'-phosphate
  modified_base 18: mod_base = OTHER; note = 2'-O-methylcytidine-3'-phosphate
  modified_base 19: mod_base = OTHER; note = 2'-O-methylcytidine-3'-phosphate
  modified_base 20: mod_base = OTHER; note = 2'-O-methyladenosine-3'-phosphate
  modified_base 21: mod_base = OTHER; note = 2'-O-methylguanosine-3'-phosphorothioate
  modified_base 22: mod_base = OTHER; note = 2'-O-methyladenosine-3'-phosphorothioate
  modified_base 23: mod_base = OTHER; note = 2'-O-methylguanosine
agagtcctcctagagacccagag

SEQ ID NO: 477 - RNA, 23 nt, synthetic construct
  source 1..23: mol_type = other RNA
  modified_base 1: mod_base = OTHER; note = 2'-O-methyladenosine-3'-phosphorothioate
  modified_base 2: mod_base = OTHER; note = 2'-deoxy-2'-fluoroadenosine-3'-phosphorothioate
  modified_base 3: mod_base = OTHER; note = 2'-O-methylcytidine-3'-phosphate
  modified_base 4: mod_base = OTHER; note = 2'-O-methyladenosine-3'-phosphate
  modified_base 5: mod_base = OTHER; note = 2'-O-methyluridine-3'-phosphate
  modified_base 6: mod_base = OTHER; note = 2'-deoxy-2'-fluoroadenosine-3'-phosphate
  modified_base 7: mod_base = OTHER; note = 2'-O-methyluridine-3'-phosphate
  modified_base 8: mod_base = OTHER; note = 2'-deoxy-2'-fluoroadenosine-3'-phosphate
  modified_base 9: mod_base = OTHER; note = 2'-deoxy-2'-fluorouridine-3'-phosphate
  modified_base 10: mod_base = OTHER; note = 2'-O-methyluridine-3'-phosphate
  modified_base 11: mod_base = OTHER; note = 2'-O-methyladenosine-3'-phosphate
  modified_base 12: mod_base = OTHER; note = 2'-O-methylguanosine-3'-phosphate
  modified_base 13: mod_base = OTHER; note = 2'-O-methyluridine-3'-phosphate
  modified_base 14: mod_base = OTHER; note = 2'-deoxy-2'-fluorouridine-3'-phosphate
  modified_base 15: mod_base = OTHER; note = 2'-O-methylcytidine-3'-phosphate
  modified_base 16: mod_base = OTHER; note = 2'-deoxy-2'-fluoroadenosine-3'-phosphate
  modified_base 17: mod_base = OTHER; note = 2'-O-methyluridine-3'-phosphate
  modified_base 18: mod_base = OTHER; note = 2'-O-methyladenosine-3'-phosphate
  modified_base 19: mod_base = OTHER; note = 2'-O-methylguanosine-3'-phosphate
  modified_base 20: mod_base = OTHER; note = 2'-O-methyladenosine-3'-phosphate
  modified_base 21: mod_base = OTHER; note = 2'-O-methylguanosine-3'-phosphorothioate
  modified_base 22: mod_base = OTHER; note = 2'-O-methyluridine-3'-phosphorothioate
  modified_base 23: mod_base = OTHER; note = 2'-O-methylcytidine
aacatatattagttcatagagtc

SEQ ID NO: 478 - RNA, 23 nt, synthetic construct
  source 1..23: mol_type = other RNA
  modified_base 1: mod_base = OTHER; note = 2'-O-methyladenosine-3'-phosphorothioate
  modified_base 2: mod_base = OTHER; note = 2'-deoxy-2'-fluorocytidine-3'-phosphorothioate
  modified_base 3: mod_base = OTHER; note = 2'-O-methyluridine-3'-phosphate
  modified_base 4: mod_base = OTHER; note = 2'-O-methyluridine-3'-phosphate
  modified_base 5: mod_base = OTHER; note = 2'-O-methylcytidine-3'-phosphate
  modified_base 6: mod_base = OTHER; note = 2'-deoxy-2'-fluoroadenosine-3'-phosphate
  modified_base 7: mod_base = OTHER; note = 2'-O-methyluridine-3'-phosphate
  modified_base 8: mod_base = OTHER; note = 2'-deoxy-2'-fluoroguanosine-3'-phosphate
  modified_base 9: mod_base = OTHER; note = 2'-deoxy-2'-fluoroguanosine-3'-phosphate
  modified_base 10: mod_base = OTHER; note = 2'-O-methyladenosine-3'-phosphate
  modified_base 11: mod_base = OTHER; note = 2'-O-methyladenosine-3'-phosphate
  modified_base 12: mod_base = OTHER; note = 2'-O-methylguanosine-3'-phosphate
  modified_base 13: mod_base = OTHER; note = 2'-O-methylcytidine-3'-phosphate
  modified_base 14: mod_base = OTHER; note = 2'-deoxy-2'-fluorouridine-3'-phosphate
  modified_base 15: mod_base = OTHER; note = 2'-O-methyluridine-3'-phosphate
  modified_base 16: mod_base = OTHER; note = 2'-deoxy-2'-fluorouridine-3'-phosphate
  modified_base 17: mod_base = OTHER; note = 2'-O-methyladenosine-3'-phosphate
  modified_base 18: mod_base = OTHER; note = 2'-O-methyluridine-3'-phosphate
  modified_base 19: mod_base = OTHER; note = 2'-O-methylcytidine-3'-phosphate
  modified_base 20: mod_base = OTHER; note = 2'-O-methylcytidine-3'-phosphate
  modified_base 21: mod_base = OTHER; note = 2'-O-methyladenosine-3'-phosphorothioate
  modified_base 22: mod_base = OTHER; note = 2'-O-methyladenosine-3'-phosphorothioate
  modified_base 23: mod_base = OTHER; note = 2'-O-methyladenosine
acttcatggaagctttatccaaa

SEQ ID NO: 479 - RNA, 23 nt, synthetic construct
  source 1..23: mol_type = other RNA
  modified_base 1: mod_base = OTHER; note = 2'-O-methyladenosine-3'-phosphorothioate
  modified_base 2: mod_base = OTHER; note = 2'-deoxy-2'-fluoroadenosine-3'-phosphorothioate
  modified_base 3: mod_base = OTHER; note = 2'-O-methylguanosine-3'-phosphate
  modified_base 4: mod_base = OTHER; note = 2'-O-methyluridine-3'-phosphate
  modified_base 5: mod_base = OTHER; note = 2'-O-methyluridine-3'-phosphate
  modified_base 6: mod_base = OTHER; note = 2'-deoxy-2'-fluorocytidine-3'-phosphate
  modified_base 7: mod_base = OTHER; note = 2'-O-methyladenosine-3'-phosphate
  modified_base 8: mod_base = OTHER; note = 2'-deoxy-2'-fluoroadenosine-3'-phosphate
  modified_base 9: mod_base = OTHER; note = 2'-deoxy-2'-fluorocytidine-3'-phosphate
  modified_base 10: mod_base = OTHER; note = 2'-O-methyladenosine-3'-phosphate
  modified_base 11: mod_base = OTHER; note = 2'-O-methylcytidine-3'-phosphate
  modified_base 12: mod_base = OTHER; note = 2'-O-methylcytidine-3'-phosphate
  modified_base 13: mod_base = OTHER; note = 2'-O-methyluridine-3'-phosphate
  modified_base 14: mod_base = OTHER; note = 2'-deoxy-2'-fluorouridine-3'-phosphate
  modified_base 15: mod_base = OTHER; note = 2'-O-methyluridine-3'-phosphate
  modified_base 16: mod_base = OTHER; note = 2'-deoxy-2'-fluorocytidine-3'-phosphate
  modified_base 17: mod_base = OTHER; note = 2'-O-methylcytidine-3'-phosphate
  modified_base 18: mod_base = OTHER; note = 2'-O-methylguanosine-3'-phosphate
  modified_base 19: mod_base = OTHER; note = 2'-O-methylcytidine-3'-phosphate
  modified_base 20: mod_base = OTHER; note = 2'-O-methyluridine-3'-phosphate
  modified_base 21: mod_base = OTHER; note = 2'-O-methyluridine-3'-phosphorothioate
  modified_base 22: mod_base = OTHER; note = 2'-O-methylcytidine-3'-phosphorothioate
  modified_base 23: mod_base = OTHER; note = 2'-O-methyladenosine
aagttcaacacctttccgcttca

SEQ ID NO: 480 - RNA, 23 nt, synthetic construct
  source 1..23: mol_type = other RNA
  modified_base 1: mod_base = OTHER; note = 2'-O-methyladenosine-3'-phosphorothioate
  modified_base 2: mod_base = OTHER; note = 2'-deoxy-2'-fluorouridine-3'-phosphorothioate
  modified_base 3: mod_base = OTHER; note = 2'-O-methyluridine-3'-phosphate
  modified_base 4: mod_base = OTHER; note = 2'-O-methyluridine-3'-phosphate
  modified_base 5: mod_base = OTHER; note = 2'-O-methyladenosine-3'-phosphate
  modified_base 6: mod_base = OTHER; note = 2'-deoxy-2'-fluorouridine-3'-phosphate
  modified_base 7: mod_base = OTHER; note = 2'-O-methylguanosine-3'-phosphate
  modified_base 8: mod_base = OTHER; note = 2'-deoxy-2'-fluorouridine-3'-phosphate
  modified_base 9: mod_base = OTHER; note = 2'-deoxy-2'-fluorocytidine-3'-phosphate
  modified_base 10: mod_base = OTHER; note = 2'-O-methyluridine-3'-phosphate
  modified_base 11: mod_base = OTHER; note = 2'-O-methyluridine-3'-phosphate
  modified_base 12: mod_base = OTHER; note = 2'-O-methyluridine-3'-phosphate
  modified_base 13: mod_base = OTHER; note = 2'-O-methyluridine-3'-phosphate
  modified_base 14: mod_base = OTHER; note = 2'-deoxy-2'-fluoroadenosine-3'-phosphate
  modified_base 15: mod_base = OTHER; note = 2'-O-methylguanosine-3'-phosphate
  modified_base 16: mod_base = OTHER; note = 2'-deoxy-2'-fluorouridine-3'-phosphate
  modified_base 17: mod_base = OTHER; note = 2'-O-methyluridine-3'-phosphate
  modified_base 18: mod_base = OTHER; note = 2'-O-methylcytidine-3'-phosphate
  modified_base 19: mod_base = OTHER; note = 2'-O-methyladenosine-3'-phosphate
  modified_base 20: mod_base = OTHER; note = 2'-O-methyladenosine-3'-phosphate
  modified_base 21: mod_base = OTHER; note = 2'-O-methylcytidine-3'-phosphorothioate
  modified_base 22: mod_base = OTHER; note = 2'-O-methyladenosine-3'-phosphorothioate
  modified_base 23: mod_base = OTHER; note = 2'-O-methylcytidine
atttatgtcttttagttcaacac

SEQ ID NO: 481 - RNA, 23 nt, synthetic construct
  source 1..23: mol_type = other RNA
  modified_base 1: mod_base = OTHER; note = 2'-O-methyladenosine-3'-phosphorothioate
  modified_base 2: mod_base = OTHER; note = 2'-deoxy-2'-fluoroadenosine-3'-phosphorothioate
  modified_base 3: mod_base = OTHER; note = 2'-O-methyluridine-3'-phosphate
  modified_base 4: mod_base = OTHER; note = 2'-O-methyladenosine-3'-phosphate
  modified_base 5: mod_base = OTHER; note = 2'-O-methylcytidine-3'-phosphate
  modified_base 6: mod_base = OTHER; note = 2'-deoxy-2'-fluorocytidine-3'-phosphate
  modified_base 7: mod_base = OTHER; note = 2'-O-methylcytidine-3'-phosphate
  modified_base 8: mod_base = OTHER; note = 2'-deoxy-2'-fluoroadenosine-3'-phosphate
  modified_base 9: mod_base = OTHER; note = 2'-deoxy-2'-fluoroadenosine-3'-phosphate
  modified_base 10: mod_base = OTHER; note = 2'-O-methylguanosine-3'-phosphate
  modified_base 11: mod_base = OTHER; note = 2'-O-methylguanosine-3'-phosphate
  modified_base 12: mod_base = OTHER; note = 2'-O-methylcytidine-3'-phosphate
  modified_base 13: mod_base = OTHER; note = 2'-O-methyladenosine-3'-phosphate
  modified_base 14: mod_base = OTHER; note = 2'-deoxy-2'-fluorouridine-3'-phosphate
  modified_base 15: mod_base = OTHER; note = 2'-O-methylcytidine-3'-phosphate
  modified_base 16: mod_base = OTHER; note = 2'-deoxy-2'-fluorouridine-3'-phosphate
  modified_base 17: mod_base = OTHER; note = 2'-O-methylcytidine-3'-phosphate
  modified_base 18: mod_base = OTHER; note = 2'-O-methyluridine-3'-phosphate
  modified_base 19: mod_base = OTHER; note = 2'-O-methyluridine-3'-phosphate
  modified_base 20: mod_base = OTHER; note = 2'-O-methyluridine-3'-phosphate
  modified_base 21: mod_base = OTHER; note = 2'-O-methyladenosine-3'-phosphorothioate
  modified_base 22: mod_base = OTHER; note = 2'-O-methyluridine-3'-phosphorothioate
  modified_base 23: mod_base = OTHER; note = 2'-O-methylguanosine
aatacccaaggcatctctttatg

SEQ ID NO: 482 - RNA, 23 nt, synthetic construct
  source 1..23: mol_type = other RNA
  modified_base 1: mod_base = OTHER; note = 2'-O-methyladenosine-3'-phosphorothioate
  modified_base 2: mod_base = OTHER; note = 2'-deoxy-2'-fluoroadenosine-3'-phosphorothioate
  modified_base 3: mod_base = OTHER; note = 2'-O-methylguanosine-3'-phosphate
  modified_base 4: mod_base = OTHER; note = 2'-O-methyladenosine-3'-phosphate
  modified_base 5: mod_base = OTHER; note = 2'-O-methylguanosine-3'-phosphate
  modified_base 6: mod_base = OTHER; note = 2'-deoxy-2'-fluoroadenosine-3'-phosphate
  modified_base 7: mod_base = OTHER; note = 2'-O-methyluridine-3'-phosphate
  modified_base 8: mod_base = OTHER; note = 2'-deoxy-2'-fluoroadenosine-3'-phosphate
  modified_base 9: mod_base = OTHER; note = 2'-deoxy-2'-fluorocytidine-3'-phosphate
  modified_base 10: mod_base = OTHER; note = 2'-O-methyladenosine-3'-phosphate
  modified_base 11: mod_base = OTHER; note = 2'-O-methyluridine-3'-phosphate
  modified_base 12: mod_base = OTHER; note = 2'-O-methylcytidine-3'-phosphate
  modified_base 13: mod_base = OTHER; note = 2'-O-methylcytidine-3'-phosphate
  modified_base 14: mod_base = OTHER; note = 2'-deoxy-2'-fluoroadenosine-3'-phosphate
  modified_base 15: mod_base = OTHER; note = 2'-O-methylguanosine-3'-phosphate
  modified_base 16: mod_base = OTHER; note = 2'-deoxy-2'-fluoroadenosine-3'-phosphate
  modified_base 17: mod_base = OTHER; note = 2'-O-methyluridine-3'-phosphate
  modified_base 18: mod_base = OTHER; note = 2'-O-methylguanosine-3'-phosphate
  modified_base 19: mod_base = OTHER; note = 2'-O-methyladenosine-3'-phosphate
  modified_base 20: mod_base = OTHER; note = 2'-O-methyluridine-3'-phosphate
  modified_base 21: mod_base = OTHER; note = 2'-O-methyladenosine-3'-phosphorothioate
  modified_base 22: mod_base = OTHER; note = 2'-O-methylcytidine-3'-phosphorothioate
  modified_base 23: mod_base = OTHER; note = 2'-O-methylcytidine
aagagatacatccagatgatacc

SEQ ID NO: 483 - RNA, 23 nt, synthetic construct
  source 1..23: mol_type = other RNA
  modified_base 1: mod_base = OTHER; note = 2'-O-methyladenosine-3'-phosphorothioate
  modified_base 2: mod_base = OTHER; note = 2'-deoxy-2'-fluorouridine-3'-phosphorothioate
  modified_base 3: mod_base = OTHER; note = 2'-O-methyluridine-3'-phosphate
  modified_base 4: mod_base = OTHER; note = 2'-O-methylcytidine-3'-phosphate
  modified_base 5: mod_base = OTHER; note = 2'-O-methyladenosine-3'-phosphate
  modified_base 6: mod_base = OTHER; note = 2'-deoxy-2'-fluoroguanosine-3'-phosphate
  modified_base 7: mod_base = OTHER; note = 2'-O-methyladenosine-3'-phosphate
  modified_base 8: mod_base = OTHER; note = 2'-deoxy-2'-fluoroguanosine-3'-phosphate
  modified_base 9: mod_base = OTHER; note = 2'-deoxy-2'-fluoroadenosine-3'-phosphate
  modified_base 10: mod_base = OTHER; note = 2'-O-methyladenosine-3'-phosphate
  modified_base 11: mod_base = OTHER; note = 2'-O-methyladenosine-3'-phosphate
  modified_base 12: mod_base = OTHER; note = 2'-O-methylguanosine-3'-phosphate
  modified_base 13: mod_base = OTHER; note = 2'-O-methylcytidine-3'-phosphate
  modified_base 14: mod_base = OTHER; note = 2'-deoxy-2'-fluorocytidine-3'-phosphate
  modified_base 15: mod_base = OTHER; note = 2'-O-methyladenosine-3'-phosphate
  modified_base 16: mod_base = OTHER; note = 2'-deoxy-2'-fluoroguanosine-3'-phosphate
  modified_base 17: mod_base = OTHER; note = 2'-O-methyladenosine-3'-phosphate
  modified_base 18: mod_base = OTHER; note = 2'-O-methylguanosine-3'-phosphate
  modified_base 19: mod_base = OTHER; note = 2'-O-methyladenosine-3'-phosphate
  modified_base 20: mod_base = OTHER; note = 2'-O-methyluridine-3'-phosphate
  modified_base 21: mod_base = OTHER; note = 2'-O-methyladenosine-3'-phosphorothioate
  modified_base 22: mod_base = OTHER; note = 2'-O-methylcytidine-3'-phosphorothioate
  modified_base 23: mod_base = OTHER; note = 2'-O-methyladenosine
attcagagaaagccagagataca

SEQ ID NO: 484 - RNA, 23 nt, synthetic construct
  source 1..23: mol_type = other RNA
  modified_base 1: mod_base = OTHER; note = 2'-O-methyladenosine-3'-phosphorothioate
  modified_base 2: mod_base = OTHER; note = 2'-deoxy-2'-fluorouridine-3'-phosphorothioate
  modified_base 3: mod_base = OTHER; note = 2'-O-methylcytidine-3'-phosphate
  modified_base 4: mod_base = OTHER; note = 2'-O-methylcytidine-3'-phosphate
  modified_base 5: mod_base = OTHER; note = 2'-O-methyladenosine-3'-phosphate
  modified_base 6: mod_base = OTHER; note = 2'-deoxy-2'-fluoroadenosine-3'-phosphate
  modified_base 7: mod_base = OTHER; note = 2'-O-methylcytidine-3'-phosphate
  modified_base 8: mod_base = OTHER; note = 2'-deoxy-2'-fluoroadenosine-3'-phosphate
  modified_base 9: mod_base = OTHER; note = 2'-deoxy-2'-fluoroguanosine-3'-phosphate
  modified_base 10: mod_base = OTHER; note = 2'-O-methyladenosine-3'-phosphate
  modified_base 11: mod_base = OTHER; note = 2'-O-methylguanosine-3'-phosphate
  modified_base 12: mod_base = OTHER; note = 2'-O-methyladenosine-3'-phosphate
  modified_base 13: mod_base = OTHER; note = 2'-O-methyluridine-3'-phosphate
  modified_base 14: mod_base = OTHER; note = 2'-deoxy-2'-fluorouridine-3'-phosphate
  modified_base 15: mod_base = OTHER; note = 2'-O-methyluridine-3'-phosphate
  modified_base 16: mod_base = OTHER; note = 2'-deoxy-2'-fluorocytidine-3'-phosphate
  modified_base 17: mod_base = OTHER; note = 2'-O-methyladenosine-3'-phosphate
  modified_base 18: mod_base = OTHER; note = 2'-O-methylguanosine-3'-phosphate
  modified_base 19: mod_base = OTHER; note = 2'-O-methyladenosine-3'-phosphate
  modified_base 20: mod_base = OTHER; note = 2'-O-methylguanosine-3'-phosphate
  modified_base 21: mod_base = OTHER; note = 2'-O-methyladenosine-3'-phosphorothioate
  modified_base 22: mod_base = OTHER; note = 2'-O-methyladenosine-3'-phosphorothioate
  modified_base 23: mod_base = OTHER; note = 2'-O-methyladenosine
atccaacagagatttcagagaaa

SEQ ID NO: 485 - RNA, 23 nt, synthetic construct
  source 1..23: mol_type = other RNA
  modified_base 1: mod_base = OTHER; note = 2'-O-methyladenosine-3'-phosphorothioate
  modified_base 2: mod_base = OTHER; note = 2'-deoxy-2'-fluorouridine-3'-phosphorothioate
  modified_base 3: mod_base = OTHER; note = 2'-O-methylcytidine-3'-phosphate
  modified_base 4: mod_base = OTHER; note = 2'-O-methyluridine-3'-phosphate
  modified_base 5: mod_base = OTHER; note = 2'-O-methyluridine-3'-phosphate
  modified_base 6: mod_base = OTHER; note = 2'-deoxy-2'-fluorouridine-3'-phosphate
  modified_base 7: mod_base = OTHER; note = 2'-O-methyladenosine-3'-phosphate
  modified_base 8: mod_base = OTHER; note = 2'-deoxy-2'-fluorouridine-3'-phosphate
  modified_base 9: mod_base = OTHER; note = 2'-deoxy-2'-fluorouridine-3'-phosphate
  modified_base 10: mod_base = OTHER; note = 2'-O-methyladenosine-3'-phosphate
  modified_base 11: mod_base = OTHER; note = 2'-O-methyladenosine-3'-phosphate
  modified_base 12: mod_base = OTHER; note = 2'-O-methyladenosine-3'-phosphate
  modified_base 13: mod_base = OTHER; note = 2'-O-methyluridine-3'-phosphate
  modified_base 14: mod_base = OTHER; note = 2'-deoxy-2'-fluorouridine-3'-phosphate
  modified_base 15: mod_base = OTHER; note = 2'-O-methylcytidine-3'-phosphate
  modified_base 16: mod_base = OTHER; note = 2'-deoxy-2'-fluoroadenosine-3'-phosphate
  modified_base 17: mod_base = OTHER; note = 2'-O-methylguanosine-3'-phosphate
  modified_base 18: mod_base = OTHER; note = 2'-O-methylcytidine-3'-phosphate
  modified_base 19: mod_base = OTHER; note = 2'-O-methyluridine-3'-phosphate
  modified_base 20: mod_base = OTHER; note = 2'-O-methylcytidine-3'-phosphate
  modified_base 21: mod_base = OTHER; note = 2'-O-methylcytidine-3'-phosphorothioate
  modified_base 22: mod_base = OTHER; note = 2'-O-methyladenosine-3'-phosphorothioate
  modified_base 23: mod_base = OTHER; note = 2'-O-methyladenosine
atctttattaaattcagctccaa

SEQ ID NO: 486 - RNA, 23 nt, synthetic construct
  source 1..23: mol_type = other RNA
  modified_base 1: mod_base = OTHER; note = 2'-O-methyladenosine-3'-phosphorothioate
  modified_base 2: mod_base = OTHER; note = 2'-deoxy-2'-fluorocytidine-3'-phosphorothioate
  modified_base 3: mod_base = OTHER; note = 2'-O-methylcytidine-3'-phosphate
  modified_base 4: mod_base = OTHER; note = 2'-O-methyluridine-3'-phosphate
  modified_base 5: mod_base = OTHER; note = 2'-O-methylcytidine-3'-phosphate
  modified_base 6: mod_base = OTHER; note = 2'-deoxy-2'-fluorouridine-3'-phosphate
  modified_base 7: mod_base = OTHER; note = 2'-O-methyluridine-3'-phosphate
  modified_base 8: mod_base = OTHER; note = 2'-deoxy-2'-fluorouridine-3'-phosphate
  modified_base 9: mod_base = OTHER; note = 2'-deoxy-2'-fluoroadenosine-3'-phosphate
  modified_base 10: mod_base = OTHER; note = 2'-O-methylcytidine-3'-phosphate
  modified_base 11: mod_base = OTHER; note = 2'-O-methyladenosine-3'-phosphate
  modified_base 12: mod_base = OTHER; note = 2'-O-methylcytidine-3'-phosphate
  modified_base 13: mod_base = OTHER; note = 2'-O-methyladenosine-3'-phosphate
  modified_base 14: mod_base = OTHER; note = 2'-deoxy-2'-fluoroadenosine-3'-phosphate
  modified_base 15: mod_base = OTHER; note = 2'-O-methyluridine-3'-phosphate
  modified_base 16: mod_base = OTHER; note = 2'-deoxy-2'-fluorocytidine-3'-phosphate
  modified_base 17: mod_base = OTHER; note = 2'-O-methyladenosine-3'-phosphate
  modified_base 18: mod_base = OTHER; note = 2'-O-methyluridine-3'-phosphate
  modified_base 19: mod_base = OTHER; note = 2'-O-methylcytidine-3'-phosphate
  modified_base 20: mod_base = OTHER; note = 2'-O-methyluridine-3'-phosphate
  modified_base 21: mod_base = OTHER; note = 2'-O-methyluridine-3'-phosphorothioate
  modified_base 22: mod_base = OTHER; note = 2'-O-methyluridine-3'-phosphorothioate
  modified_base 23: mod_base = OTHER; note = 2'-O-methyladenosine
acctctttacacaatcatcttta

SEQ ID NO: 487 - RNA, 23 nt, synthetic construct
  source 1..23: mol_type = other RNA
  modified_base 1: mod_base = OTHER; note = 2'-O-methyladenosine-3'-phosphorothioate
  modified_base 2: mod_base = OTHER; note = 2'-deoxy-2'-fluorouridine-3'-phosphorothioate
  modified_base 3: mod_base = OTHER; note = 2'-O-methylguanosine-3'-phosphate
  modified_base 4: mod_base = OTHER; note = 2'-O-methyladenosine-3'-phosphate
  modified_base 5: mod_base = OTHER; note = 2'-O-methyluridine-3'-phosphate
  modified_base 6: mod_base = OTHER; note = 2'-deoxy-2'-fluoroguanosine-3'-phosphate
  modified_base 7: mod_base = OTHER; note = 2'-O-methyluridine-3'-phosphate
  modified_base 8: mod_base = OTHER; note = 2'-deoxy-2'-fluorouridine-3'-phosphate
  modified_base 9: mod_base = OTHER; note = 2'-deoxy-2'-fluorouridine-3'-phosphate
  modified_base 10: mod_base = OTHER; note = 2'-O-methyladenosine-3'-phosphate
  modified_base 11: mod_base = OTHER; note = 2'-O-methylcytidine-3'-phosphate
  modified_base 12: mod_base = OTHER; note = 2'-O-methyladenosine-3'-phosphate
  modified_base 13: mod_base = OTHER; note = 2'-O-methylguanosine-3'-phosphate
  modified_base 14: mod_base = OTHER; note = 2'-deoxy-2'-fluorocytidine-3'-phosphate
  modified_base 15: mod_base = OTHER; note = 2'-O-methyluridine-3'-phosphate
  modified_base 16: mod_base = OTHER; note = 2'-deoxy-2'-fluorocytidine-3'-phosphate
  modified_base 17: mod_base = OTHER; note = 2'-O-methyluridine-3'-phosphate
  modified_base 18: mod_base = OTHER; note = 2'-O-methyladenosine-3'-phosphate
  modified_base 19: mod_base = OTHER; note = 2'-O-methylcytidine-3'-phosphate
  modified_base 20: mod_base = OTHER; note = 2'-O-methylcytidine-3'-phosphate
  modified_base 21: mod_base = OTHER; note = 2'-O-methylcytidine-3'-phosphorothioate
  modified_base 22: mod_base = OTHER; note = 2'-O-methyluridine-3'-phosphorothioate
  modified_base 23: mod_base = OTHER; note = 2'-O-methylcytidine
atgatgtttacagctctaccctc

SEQ ID NO: 488 - RNA, 23 nt, synthetic construct
  source 1..23: mol_type = other RNA
  modified_base 1: mod_base = OTHER; note = 2'-O-methyladenosine-3'-phosphorothioate
  modified_base 2: mod_base = OTHER; note = 2'-deoxy-2'-fluoroguanosine-3'-phosphorothioate
  modified_base 3: mod_base = OTHER; note = 2'-O-methyladenosine-3'-phosphate
  modified_base 4: mod_base = OTHER; note = 2'-O-methylguanosine-3'-phosphate
  modified_base 5: mod_base = OTHER; note = 2'-O-methylguanosine-3'-phosphate
  modified_base 6: mod_base = OTHER; note = 2'-deoxy-2'-fluorouridine-3'-phosphate
  modified_base 7: mod_base = OTHER; note = 2'-O-methyluridine-3'-phosphate
  modified_base 8: mod_base = OTHER; note = 2'-deoxy-2'-fluorouridine-3'-phosphate
  modified_base 9: mod_base = OTHER; note = 2'-deoxy-2'-fluorouridine-3'-phosphate
  modified_base 10: mod_base = OTHER; note = 2'-O-methylcytidine-3'-phosphate
  modified_base 11: mod_base = OTHER; note = 2'-O-methyladenosine-3'-phosphate
  modified_base 12: mod_base = OTHER; note = 2'-O-methylcytidine-3'-phosphate
  modified_base 13: mod_base = OTHER; note = 2'-O-methyluridine-3'-phosphate
  modified_base 14: mod_base = OTHER; note = 2'-deoxy-2'-fluoroguanosine-3'-phosphate
  modified_base 15: mod_base = OTHER; note = 2'-O-methylguanosine-3'-phosphate
  modified_base 16: mod_base = OTHER; note = 2'-deoxy-2'-fluorouridine-3'-phosphate
  modified_base 17: mod_base = OTHER; note = 2'-O-methylguanosine-3'-phosphate
  modified_base 18: mod_base = OTHER; note = 2'-O-methyladenosine-3'-phosphate
  modified_base 19: mod_base = OTHER; note = 2'-O-methyluridine-3'-phosphate
  modified_base 20: mod_base = OTHER; note = 2'-O-methylguanosine-3'-phosphate
  modified_base 21: mod_base = OTHER; note = 2'-O-methyluridine-3'-phosphorothioate
  modified_base 22: mod_base = OTHER; note = 2'-O-methyluridine-3'-phosphorothioate
  modified_base 23: mod_base = OTHER; note = 2'-O-methyluridine
agaggttttcactggtgatgttt

SEQ ID NO: 489 - RNA, 23 nt, synthetic construct
  source 1..23: mol_type = other RNA
  modified_base 1: mod_base = OTHER; note = 2'-O-methyladenosine-3'-phosphorothioate
  modified_base 2: mod_base = OTHER; note = 2'-deoxy-2'-fluoroguanosine-3'-phosphorothioate
  modified_base 3: mod_base = OTHER; note = 2'-O-methyladenosine-3'-phosphate
  modified_base 4: mod_base = OTHER; note = 2'-O-methyladenosine-3'-phosphate
  modified_base 5: mod_base = OTHER; note = 2'-O-methyladenosine-3'-phosphate
  modified_base 6: mod_base = OTHER; note = 2'-deoxy-2'-fluorocytidine-3'-phosphate
  modified_base 7: mod_base = OTHER; note = 2'-O-methyladenosine-3'-phosphate
  modified_base 8: mod_base = OTHER; note = 2'-deoxy-2'-fluoroadenosine-3'-phosphate
  modified_base 9: mod_base = OTHER; note = 2'-deoxy-2'-fluorocytidine-3'-phosphate
  modified_base 10: mod_base = OTHER; note = 2'-O-methyladenosine-3'-phosphate
  modified_base 11: mod_base = OTHER; note = 2'-O-methyluridine-3'-phosphate
  modified_base 12: mod_base = OTHER; note = 2'-O-methylcytidine-3'-phosphate
  modified_base 13: mod_base = OTHER; note = 2'-O-methyladenosine-3'-phosphate
  modified_base 14: mod_base = OTHER; note = 2'-deoxy-2'-fluorouridine-3'-phosphate
  modified_base 15: mod_base = OTHER; note = 2'-O-methylcytidine-3'-phosphate
  modified_base 16: mod_base = OTHER; note = 2'-deoxy-2'-fluorouridine-3'-phosphate
  modified_base 17: mod_base = OTHER; note = 2'-O-methyladenosine-3'-phosphate
  modified_base 18: mod_base = OTHER; note = 2'-O-methyluridine-3'-phosphate
  modified_base 19: mod_base = OTHER; note = 2'-O-methylguanosine-3'-phosphate
  modified_base 20: mod_base = OTHER; note = 2'-O-methyladenosine-3'-phosphate
  modified_base 21: mod_base = OTHER; note = 2'-O-methylguanosine-3'-phosphorothioate
  modified_base 22: mod_base = OTHER; note = 2'-O-methylguanosine-3'-phosphorothioate
  modified_base 23: mod_base = OTHER; note = 2'-O-methyluridine
agaaacaacatcatctatgaggt

SEQ ID NO: 490 - RNA, 23 nt, synthetic construct
  source 1..23: mol_type = other RNA
  modified_base 1: mod_base = OTHER; note = 2'-O-methyladenosine-3'-phosphorothioate
  modified_base 2: mod_base = OTHER; note = 2'-deoxy-2'-fluoroadenosine-3'-phosphorothioate
  modified_base 3: mod_base = OTHER; note = 2'-O-methylcytidine-3'-phosphate
  modified_base 4: mod_base = OTHER; note = 2'-O-methylcytidine-3'-phosphate
  modified_base 5: mod_base = OTHER; note = 2'-O-methyluridine-3'-phosphate
  modified_base 6: mod_base = OTHER; note = 2'-deoxy-2'-fluorocytidine-3'-phosphate
  modified_base 7: mod_base = OTHER; note = 2'-O-methyluridine-3'-phosphate
  modified_base 8: mod_base = OTHER; note = 2'-deoxy-2'-fluorouridine-3'-phosphate
  modified_base 9: mod_base = OTHER; note = 2'-deoxy-2'-fluoroadenosine-3'-phosphate
  modified_base 10: mod_base = OTHER; note = 2'-O-methyluridine-3'-phosphate
  modified_base 11: mod_base = OTHER; note = 2'-O-methylguanosine-3'-phosphate
  modified_base 12: mod_base = OTHER; note = 2'-O-methyladenosine-3'-phosphate
  modified_base 13: mod_base = OTHER; note = 2'-O-methylguanosine-3'-phosphate
  modified_base 14: mod_base = OTHER; note = 2'-deoxy-2'-fluorouridine-3'-phosphate
  modified_base 15: mod_base = OTHER; note = 2'-O-methylguanosine-3'-phosphate
  modified_base 16: mod_base = OTHER; note = 2'-deoxy-2'-fluoroadenosine-3'-phosphate
  modified_base 17: mod_base = OTHER; note = 2'-O-methyladenosine-3'-phosphate
  modified_base 18: mod_base = OTHER; note = 2'-O-methyladenosine-3'-phosphate
  modified_base 19: mod_base = OTHER; note = 2'-O-methylcytidine-3'-phosphate
  modified_base 20: mod_base = OTHER; note = 2'-O-methyladenosine-3'-phosphate
  modified_base 21: mod_base = OTHER; note = 2'-O-methyladenosine-3'-phosphorothioate
  modified_base 22: mod_base = OTHER; note = 2'-O-methylcytidine-3'-phosphorothioate
  modified_base 23: mod_base = OTHER; note = 2'-O-methyladenosine
aacctcttatgagtgaaacaaca

SEQ ID NO: 491 - RNA, 23 nt, synthetic construct
  source 1..23: mol_type = other RNA
  modified_base 1: mod_base = OTHER; note = 2'-O-methyladenosine-3'-phosphorothioate
  modified_base 2: mod_base = OTHER; note = 2'-deoxy-2'-fluoroadenosine-3'-phosphorothioate
  modified_base 3: mod_base = OTHER; note = 2'-O-methyladenosine-3'-phosphate
  modified_base 4: mod_base = OTHER; note = 2'-O-methyladenosine-3'-phosphate
  modified_base 5: mod_base = OTHER; note = 2'-O-methyluridine-3'-phosphate
  modified_base 6: mod_base = OTHER; note = 2'-deoxy-2'-fluoroguanosine-3'-phosphate
  modified_base 7: mod_base = OTHER; note = 2'-O-methylcytidine-3'-phosphate
  modified_base 8: mod_base = OTHER; note = 2'-deoxy-2'-fluoroadenosine-3'-phosphate
  modified_base 9: mod_base = OTHER; note = 2'-deoxy-2'-fluorouridine-3'-phosphate
  modified_base 10: mod_base = OTHER; note = 2'-O-methyladenosine-3'-phosphate
  modified_base 11: mod_base = OTHER; note = 2'-O-methyluridine-3'-phosphate
  modified_base 12: mod_base = OTHER; note = 2'-O-methyluridine-3'-phosphate
  modified_base 13: mod_base = OTHER; note = 2'-O-methyluridine-3'-phosphate
  modified_base 14: mod_base = OTHER; note = 2'-deoxy-2'-fluorouridine-3'-phosphate
  modified_base 15: mod_base = OTHER; note = 2'-O-methylcytidine-3'-phosphate
  modified_base 16: mod_base = OTHER; note = 2'-deoxy-2'-fluorouridine-3'-phosphate
  modified_base 17: mod_base = OTHER; note = 2'-O-methylguanosine-3'-phosphate
  modified_base 18: mod_base = OTHER; note = 2'-O-methylguanosine-3'-phosphate
  modified_base 19: mod_base = OTHER; note = 2'-O-methyluridine-3'-phosphate
  modified_base 20: mod_base = OTHER; note = 2'-O-methyluridine-3'-phosphate
  modified_base 21: mod_base = OTHER; note = 2'-O-methylcytidine-3'-phosphorothioate
  modified_base 22: mod_base = OTHER; note = 2'-O-methylcytidine-3'-phosphorothioate
  modified_base 23: mod_base = OTHER; note = 2'-O-methyladenosine
aaaatgcatattttctggttcca

SEQ ID NO: 492 - RNA, 23 nt, synthetic construct
  source 1..23: mol_type = other RNA
  modified_base 1: mod_base = OTHER; note = 2'-O-methyladenosine-3'-phosphorothioate
  modified_base 2: mod_base = OTHER; note = 2'-deoxy-2'-fluoroadenosine-3'-phosphorothioate
  modified_base 3: mod_base = OTHER; note = 2'-O-methylguanosine-3'-phosphate
  modified_base 4: mod_base = OTHER; note = 2'-O-methyladenosine-3'-phosphate
  modified_base 5: mod_base = OTHER; note = 2'-O-methyladenosine-3'-phosphate
  modified_base 6: mod_base = OTHER; note = 2'-deoxy-2'-fluoroguanosine-3'-phosphate
  modified_base 7: mod_base = OTHER; note = 2'-O-methylcytidine-3'-phosphate
  modified_base 8: mod_base = OTHER; note = 2'-deoxy-2'-fluorouridine-3'-phosphate
  modified_base 9: mod_base = OTHER; note = 2'-deoxy-2'-fluorouridine-3'-phosphate
  modified_base 10: mod_base = OTHER; note = 2'-O-methyluridine-3'-phosphate
  modified_base 11: mod_base = OTHER; note = 2'-O-methyluridine-3'-phosphate
  modified_base 12: mod_base = OTHER; note = 2'-O-methylcytidine-3'-phosphate
  modified_base 13: mod_base = OTHER; note = 2'-O-methyluridine-3'-phosphate
  modified_base 14: mod_base = OTHER; note = 2'-deoxy-2'-fluorouridine-3'-phosphate
  modified_base 15: mod_base = OTHER; note = 2'-O-methyluridine-3'-phosphate
  modified_base 16: mod_base = OTHER; note = 2'-deoxy-2'-fluorocytidine-3'-phosphate
  modified_base 17: mod_base = OTHER; note = 2'-O-methyladenosine-3'-phosphate
  modified_base 18: mod_base = OTHER; note = 2'-O-methylguanosine-3'-phosphate
  modified_base 19: mod_base = OTHER; note = 2'-O-methyluridine-3'-phosphate
  modified_base 20: mod_base = OTHER; note = 2'-O-methyluridine-3'-phosphate
  modified_base 21: mod_base = OTHER; note = 2'-O-methylcytidine-3'-phosphorothioate
  modified_base 22: mod_base = OTHER; note = 2'-O-methyladenosine-3'-phosphorothioate
  modified_base 23: mod_base = OTHER; note = 2'-O-methyladenosine
aagaagcttttctttcagttcaa

SEQ ID NO: 493 - RNA, 23 nt, synthetic construct
  source 1..23: mol_type = other RNA
  modified_base 1: mod_base = OTHER; note = 2'-O-methyladenosine-3'-phosphorothioate
  modified_base 2: mod_base = OTHER; note = 2'-deoxy-2'-fluoroadenosine-3'-phosphorothioate
  modified_base 3: mod_base = OTHER; note = 2'-O-methylcytidine-3'-phosphate
  modified_base 4: mod_base = OTHER; note = 2'-O-methyladenosine-3'-phosphate
  modified_base 5: mod_base = OTHER; note = 2'-O-methyluridine-3'-phosphate
  modified_base 6: mod_base = OTHER; note = 2'-deoxy-2'-fluorocytidine-3'-phosphate
  modified_base 7: mod_base = OTHER; note = 2'-O-methyladenosine-3'-phosphate
  modified_base 8: mod_base = OTHER; note = 2'-deoxy-2'-fluoroadenosine-3'-phosphate
  modified_base 9: mod_base = OTHER; note = 2'-deoxy-2'-fluorouridine-3'-phosphate
  modified_base 10: mod_base = OTHER; note = 2'-O-methylcytidine-3'-phosphate
  modified_base 11: mod_base = OTHER; note = 2'-O-methyladenosine-3'-phosphate
  modified_base 12: mod_base = OTHER; note = 2'-O-methylcytidine-3'-phosphate
  modified_base 13: mod_base = OTHER; note = 2'-O-methylguanosine-3'-phosphate
  modified_base 14: mod_base = OTHER; note = 2'-deoxy-2'-fluoroguanosine-3'-phosphate
  modified_base 15: mod_base = OTHER; note = 2'-O-methyluridine-3'-phosphate
  modified_base 16: mod_base = OTHER; note = 2'-deoxy-2'-fluorouridine-3'-phosphate
  modified_base 17: mod_base = OTHER; note = 2'-O-methylcytidine-3'-phosphate
  modified_base 18: mod_base = OTHER; note = 2'-O-methylcytidine-3'-phosphate
  modified_base 19: mod_base = OTHER; note = 2'-O-methyluridine-3'-phosphate
  modified_base 20: mod_base = OTHER; note = 2'-O-methylcytidine-3'-phosphate
  modified_base 21: mod_base = OTHER; note = 2'-O-methylguanosine-3'-phosphorothioate
  modified_base 22: mod_base = OTHER; note = 2'-O-methylguanosine-3'-phosphorothioate
  modified_base 23: mod_base = OTHER; note = 2'-O-methyladenosine
aacatcaatcacggttcctcgga

SEQ ID NO: 494 - RNA, 23 nt, synthetic construct
  source 1..23: mol_type = other RNA
  modified_base 1: mod_base = OTHER; note = 2'-O-methyladenosine-3'-phosphorothioate
  modified_base 2: mod_base = OTHER; note = 2'-deoxy-2'-fluorouridine-3'-phosphorothioate
  modified_base 3: mod_base = OTHER; note = 2'-O-methylguanosine-3'-phosphate
  modified_base 4: mod_base = OTHER; note = 2'-O-methyladenosine-3'-phosphate
  modified_base 5: mod_base = OTHER; note = 2'-O-methylcytidine-3'-phosphate
  modified_base 6: mod_base = OTHER; note = 2'-deoxy-2'-fluoroadenosine-3'-phosphate
  modified_base 7: mod_base = OTHER; note = 2'-O-methyladenosine-3'-phosphate
  modified_base 8: mod_base = OTHER; note = 2'-deoxy-2'-fluoroadenosine-3'-phosphate
  modified_base 9: mod_base = OTHER; note = 2'-deoxy-2'-fluoroguanosine-3'-phosphate
  modified_base 10: mod_base = OTHER; note = 2'-O-methyluridine-3'-phosphate
  modified_base 11: mod_base = OTHER; note = 2'-O-methylcytidine-3'-phosphate
  modified_base 12: mod_base = OTHER; note = 2'-O-methyladenosine-3'-phosphate
  modified_base 13: mod_base = OTHER; note = 2'-O-methylguanosine-3'-phosphate
  modified_base 14: mod_base = OTHER; note = 2'-deoxy-2'-fluorouridine-3'-phosphate
  modified_base 15: mod_base = OTHER; note = 2'-O-methylcytidine-3'-phosphate
  modified_base 16: mod_base = OTHER; note = 2'-deoxy-2'-fluoroadenosine-3'-phosphate
  modified_base 17: mod_base = OTHER; note = 2'-O-methylcytidine-3'-phosphate
  modified_base 18: mod_base = OTHER; note = 2'-O-methyladenosine-3'-phosphate
  modified_base 19: mod_base = OTHER; note = 2'-O-methyluridine-3'-phosphate
  modified_base 20: mod_base = OTHER; note = 2'-O-methylcytidine-3'-phosphate
  modified_base 21: mod_base = OTHER; note = 2'-O-methyladenosine-3'-phosphorothioate
  modified_base 22: mod_base = OTHER; note = 2'-O-methyladenosine-3'-phosphorothioate
  modified_base 23: mod_base = OTHER; note = 2'-O-methyluridine
atgacaaagtcagtcacatcaat

SEQ ID NO: 495 - RNA, 23 nt, synthetic construct
  source 1..23: mol_type = other RNA
  modified_base 1: mod_base = OTHER; note = 2'-O-methyladenosine-3'-phosphorothioate
  modified_base 2: mod_base = OTHER; note = 2'-deoxy-2'-fluoroadenosine-3'-phosphorothioate
  modified_base 3: mod_base = OTHER; note = 2'-O-methylguanosine-3'-phosphate
  modified_base 4: mod_base = OTHER; note = 2'-O-methylguanosine-3'-phosphate
  modified_base 5: mod_base = OTHER; note = 2'-O-methyladenosine-3'-phosphate
  modified_base 6: mod_base = OTHER; note = 2'-deoxy-2'-fluoroguanosine-3'-phosphate
  modified_base 7: mod_base = OTHER; note = 2'-O-methylcytidine-3'-phosphate
  modified_base 8: mod_base = OTHER; note = 2'-deoxy-2'-fluoroadenosine-3'-phosphate
  modified_base 9: mod_base = OTHER; note = 2'-deoxy-2'-fluorouridine-3'-phosphate
  modified_base 10: mod_base = OTHER; note = 2'-O-methylcytidine-3'-phosphate
  modified_base 11: mod_base = OTHER; note = 2'-O-methyladenosine-3'-phosphate
  modified_base 12: mod_base = OTHER; note = 2'-O-methyluridine-3'-phosphate
  modified_base 13: mod_base = OTHER; note = 2'-O-methyluridine-3'-phosphate
  modified_base 14: mod_base = OTHER; note = 2'-deoxy-2'-fluorouridine-3'-phosphate
  modified_base 15: mod_base = OTHER; note = 2'-O-methyladenosine-3'-phosphate
  modified_base 16: mod_base = OTHER; note = 2'-deoxy-2'-fluorouridine-3'-phosphate
  modified_base 17: mod_base = OTHER; note = 2'-O-methylguanosine-3'-phosphate
  modified_base 18: mod_base = OTHER; note = 2'-O-methylguanosine-3'-phosphate
  modified_base 19: mod_base = OTHER; note = 2'-O-methyladenosine-3'-phosphate
  modified_base 20: mod_base = OTHER; note = 2'-O-methyladenosine-3'-phosphate
  modified_base 21: mod_base = OTHER; note = 2'-O-methylguanosine-3'-phosphorothioate
  modified_base 22: mod_base = OTHER; note = 2'-O-methyladenosine-3'-phosphorothioate
  modified_base 23: mod_base = OTHER; note = 2'-O-methylguanosine
aaggagcatcatttatggaagag

SEQ ID NO: 496 - RNA, 23 nt, synthetic construct
  source 1..23: mol_type = other RNA
  modified_base 1: mod_base = OTHER; note = 2'-O-methyladenosine-3'-phosphorothioate
  modified_base 2: mod_base = OTHER; note = 2'-deoxy-2'-fluorouridine-3'-phosphorothioate
  modified_base 3: mod_base = OTHER; note = 2'-O-methyluridine-3'-phosphate
  modified_base 4: mod_base = OTHER; note = 2'-O-methylguanosine-3'-phosphate
  modified_base 5: mod_base = OTHER; note = 2'-O-methyladenosine-3'-phosphate
  modified_base 6: mod_base = OTHER; note = 2'-deoxy-2'-fluorocytidine-3'-phosphate
  modified_base 7: mod_base = OTHER; note = 2'-O-methyluridine-3'-phosphate
  modified_base 8: mod_base = OTHER; note = 2'-deoxy-2'-fluoroadenosine-3'-phosphate
  modified_base 9: mod_base = OTHER; note = 2'-deoxy-2'-fluoroadenosine-3'-phosphate
  modified_base 10: mod_base = OTHER; note = 2'-O-methyluridine-3'-phosphate
  modified_base 11: mod_base = OTHER; note = 2'-O-methylguanosine-3'-phosphate
  modified_base 12: mod_base = OTHER; note = 2'-O-methyladenosine-3'-phosphate
  modified_base 13: mod_base = OTHER; note = 2'-O-methylguanosine-3'-phosphate
  modified_base 14: mod_base = OTHER; note = 2'-deoxy-2'-fluoroadenosine-3'-phosphate
  modified_base 15: mod_base = OTHER; note = 2'-O-methyladenosine-3'-phosphate
  modified_base 16: mod_base = OTHER; note = 2'-deoxy-2'-fluorocytidine-3'-phosphate
  modified_base 17: mod_base = OTHER; note = 2'-O-methyladenosine-3'-phosphate
  modified_base 18: mod_base = OTHER; note = 2'-O-methylguanosine-3'-phosphate
  modified_base 19: mod_base = OTHER; note = 2'-O-methylguanosine-3'-phosphate
  modified_base 20: mod_base = OTHER; note = 2'-O-methyladenosine-3'-phosphate
  modified_base 21: mod_base = OTHER; note = 2'-O-methylguanosine-3'-phosphorothioate
  modified_base 22: mod_base = OTHER; note = 2'-O-methylcytidine-3'-phosphorothioate
  modified_base 23: mod_base = OTHER; note = 2'-O-methyladenosine
attgactaatgagaacaggagca

SEQ ID NO: 497 - RNA, 23 nt, synthetic construct
  source 1..23: mol_type = other RNA
  modified_base 1: mod_base = OTHER; note = 2'-O-methyladenosine-3'-phosphorothioate
  modified_base 2: mod_base = OTHER; note = 2'-deoxy-2'-fluorouridine-3'-phosphorothioate
  modified_base 3: mod_base = OTHER; note = 2'-O-methylguanosine-3'-phosphate
  modified_base 4: mod_base = OTHER; note = 2'-O-methylguanosine-3'-phosphate
  modified_base 5: mod_base = OTHER; note = 2'-O-methyladenosine-3'-phosphate
  modified_base 6: mod_base = OTHER; note = 2'-deoxy-2'-fluoroadenosine-3'-phosphate
  modified_base 7: mod_base = OTHER; note = 2'-O-methylcytidine-3'-phosphate
  modified_base 8: mod_base = OTHER; note = 2'-deoxy-2'-fluorocytidine-3'-phosphate
  modified_base 9: mod_base = OTHER; note = 2'-deoxy-2'-fluoroadenosine-3'-phosphate
  modified_base 10: mod_base = OTHER; note = 2'-O-methylguanosine-3'-phosphate
  modified_base 11: mod_base = OTHER; note = 2'-O-methyladenosine-3'-phosphate
  modified_base 12: mod_base = OTHER; note = 2'-O-methyluridine-3'-phosphate
  modified_base 13: mod_base = OTHER; note = 2'-O-methyluridine-3'-phosphate
  modified_base 14: mod_base = OTHER; note = 2'-deoxy-2'-fluoroadenosine-3'-phosphate
  modified_base 15: mod_base = OTHER; note = 2'-O-methyluridine-3'-phosphate
  modified_base 16: mod_base = OTHER; note = 2'-deoxy-2'-fluoroadenosine-3'-phosphate
  modified_base 17: mod_base = OTHER; note = 2'-O-methyluridine-3'-phosphate
  modified_base 18: mod_base = OTHER; note = 2'-O-methyladenosine-3'-phosphate
  modified_base 19: mod_base = OTHER; note = 2'-O-methyluridine-3'-phosphate
  modified_base 20: mod_base = OTHER; note = 2'-O-methyladenosine-3'-phosphate
  modified_base 21: mod_base = OTHER; note = 2'-O-methylguanosine-3'-phosphorothioate
  modified_base 22: mod_base = OTHER; note = 2'-O-methylguanosine-3'-phosphorothioate
  modified_base 23: mod_base = OTHER; note = 2'-O-methyladenosine
atggaaccagattatatatagga

SEQ ID NO: 498 - RNA, 23 nt, synthetic construct
  source 1..23: mol_type = other RNA
  modified_base 1: mod_base = OTHER; note = 2'-O-methyladenosine-3'-phosphorothioate
  modified_base 2: mod_base = OTHER; note = 2'-deoxy-2'-fluorouridine-3'-phosphorothioate
  modified_base 3: mod_base = OTHER; note = 2'-O-methyluridine-3'-phosphate
  modified_base 4: mod_base = OTHER; note = 2'-O-methyluridine-3'-phosphate
  modified_base 5: mod_base = OTHER; note = 2'-O-methylcytidine-3'-phosphate
  modified_base 6: mod_base = OTHER; note = 2'-deoxy-2'-fluoroadenosine-3'-phosphate
  modified_base 7: mod_base = OTHER; note = 2'-O-methyluridine-3'-phosphate
  modified_base 8: mod_base = OTHER; note = 2'-deoxy-2'-fluorouridine-3'-phosphate
  modified_base 9: mod_base = OTHER; note = 2'-deoxy-2'-fluorouridine-3'-phosphate
  modified_base 10: mod_base = OTHER; note = 2'-O-methyluridine-3'-phosphate
  modified_base 11: mod_base = OTHER; note = 2'-O-methylcytidine-3'-phosphate
  modified_base 12: mod_base = OTHER; note = 2'-O-methyladenosine-3'-phosphate
  modified_base 13: mod_base = OTHER; note = 2'-O-methylcytidine-3'-phosphate
  modified_base 14: mod_base = OTHER; note = 2'-deoxy-2'-fluorouridine-3'-phosphate
  modified_base 15: mod_base = OTHER; note = 2'-O-methylguanosine-3'-phosphate
  modified_base 16: mod_base = OTHER; note = 2'-deoxy-2'-fluoroguanosine-3'-phosphate
  modified_base 17: mod_base = OTHER; note = 2'-O-methyladenosine-3'-phosphate
  modified_base 18: mod_base = OTHER; note = 2'-O-methyladenosine-3'-phosphate
  modified_base 19: mod_base = OTHER; note = 2'-O-methylcytidine-3'-phosphate
  modified_base 20: mod_base = OTHER; note = 2'-O-methylcytidine-3'-phosphate
  modified_base 21: mod_base = OTHER; note = 2'-O-methyladenosine-3'-phosphorothioate
  modified_base 22: mod_base = OTHER; note = 2'-O-methylguanosine-3'-phosphorothioate
  modified_base 23: mod_base = OTHER; note = 2'-O-methyladenosine
atttcattttcactggaaccaga

SEQ ID NO: 499 - RNA, 23 nt, synthetic construct
  source 1..23: mol_type = other RNA
  modified_base 1: mod_base = OTHER; note = 2'-O-methyladenosine-3'-phosphorothioate
  modified_base 2: mod_base = OTHER; note = 2'-deoxy-2'-fluoroadenosine-3'-phosphorothioate
  modified_base 3: mod_base = OTHER; note = 2'-O-methylguanosine-3'-phosphate
  modified_base 4: mod_base = OTHER; note = 2'-O-methyluridine-3'-phosphate
  modified_base 5: mod_base = OTHER; note = 2'-O-methyluridine-3'-phosphate
  modified_base 6: mod_base = OTHER; note = 2'-deoxy-2'-fluorouridine-3'-phosphate
  modified_base 7: mod_base = OTHER; note = 2'-O-methyluridine-3'-phosphate
  modified_base 8: mod_base = OTHER; note = 2'-deoxy-2'-fluoroguanosine-3'-phosphate
  modified_base 9: mod_base = OTHER; note = 2'-deoxy-2'-fluorouridine-3'-phosphate
  modified_base 10: mod_base = OTHER; note = 2'-O-methyluridine-3'-phosphate
  modified_base 11: mod_base = OTHER; note = 2'-O-methyluridine-3'-phosphate
  modified_base 12: mod_base = OTHER; note = 2'-O-methylcytidine-3'-phosphate
  modified_base 13: mod_base = OTHER; note = 2'-O-methyluridine-3'-phosphate
  modified_base 14: mod_base = OTHER; note = 2'-deoxy-2'-fluorouridine-3'-phosphate
  modified_base 15: mod_base = OTHER; note = 2'-O-methyluridine-3'-phosphate
  modified_base 16: mod_base = OTHER; note = 2'-deoxy-2'-fluoroadenosine-3'-phosphate
  modified_base 17: mod_base = OTHER; note = 2'-O-methylguanosine-3'-phosphate
  modified_base 18: mod_base = OTHER; note = 2'-O-methylguanosine-3'-phosphate
  modified_base 19: mod_base = OTHER; note = 2'-O-methyluridine-3'-phosphate
  modified_base 20: mod_base = OTHER; note = 2'-O-methylguanosine-3'-phosphate
  modified_base 21: mod_base = OTHER; note = 2'-O-methyluridine-3'-phosphorothioate
  modified_base 22: mod_base = OTHER; note = 2'-O-methylguanosine-3'-phosphorothioate
  modified_base 23: mod_base = OTHER; note = 2'-O-methylcytidine
aagttttgtttctttaggtgtgc

SEQ ID NO: 500 - RNA, 23 nt, synthetic construct
  source 1..23: mol_type = other RNA
  modified_base 1: mod_base = OTHER; note = 2'-O-methyladenosine-3'-phosphorothioate
  modified_base 2: mod_base = OTHER; note = 2'-deoxy-2'-fluoroadenosine-3'-phosphorothioate
  modified_base 3: mod_base = OTHER; note = 2'-O-methyladenosine-3'-phosphate
  modified_base 4: mod_base = OTHER; note = 2'-O-methyluridine-3'-phosphate
  modified_base 5: mod_base = OTHER; note = 2'-O-methylguanosine-3'-phosphate
  modified_base 6: mod_base = OTHER; note = 2'-deoxy-2'-fluoroguanosine-3'-phosphate
  modified_base 7: mod_base = OTHER; note = 2'-O-methylcytidine-3'-phosphate
  modified_base 8: mod_base = OTHER; note = 2'-deoxy-2'-fluorouridine-3'-phosphate
  modified_base 9: mod_base = OTHER; note = 2'-deoxy-2'-fluorocytidine-3'-phosphate
  modified_base 10: mod_base = OTHER; note = 2'-O-methyluridine-3'-phosphate
  modified_base 11: mod_base = OTHER; note = 2'-O-methyluridine-3'-phosphate
  modified_base 12: mod_base = OTHER; note = 2'-O-methyluridine-3'-phosphate
  modified_base 13: mod_base = OTHER; note = 2'-O-methylcytidine-3'-phosphate
  modified_base 14: mod_base = OTHER; note = 2'-deoxy-2'-fluorocytidine-3'-phosphate
  modified_base 15: mod_base = OTHER; note = 2'-O-methyladenosine-3'-phosphate
  modified_base 16: mod_base = OTHER; note = 2'-deoxy-2'-fluoroadenosine-3'-phosphate
  modified_base 17: mod_base = OTHER; note = 2'-O-methylguanosine-3'-phosphate
  modified_base 18: mod_base = OTHER; note = 2'-O-methyluridine-3'-phosphate
  modified_base 19: mod_base = OTHER; note = 2'-O-methyluridine-3'-phosphate
  modified_base 20: mod_base = OTHER; note = 2'-O-methyluridine-3'-phosphate
  modified_base 21: mod_base = OTHER; note = 2'-O-methyluridine-3'-phosphorothioate
  modified_base 22: mod_base = OTHER; note = 2'-O-methylguanosine-3'-phosphorothioate
  modified_base 23: mod_base = OTHER; note = 2'-O-methyluridine
aaatggctctttccaagttttgt

SEQ ID NO: 501 - RNA, 23 nt, synthetic construct
  source 1..23: mol_type = other RNA
  modified_base 1: mod_base = OTHER; note = 2'-O-methyladenosine-3'-phosphorothioate
  modified_base 2: mod_base = OTHER; note = 2'-deoxy-2'-fluorouridine-3'-phosphorothioate
  modified_base 3: mod_base = OTHER; note = 2'-O-methyluridine-3'-phosphate
  modified_base 4: mod_base = OTHER; note = 2'-O-methylguanosine-3'-phosphate
  modified_base 5: mod_base = OTHER; note = 2'-O-methyladenosine-3'-phosphate
  modified_base 6: mod_base = OTHER; note = 2'-deoxy-2'-fluorouridine-3'-phosphate
  modified_base 7: mod_base = OTHER; note = 2'-O-methyladenosine-3'-phosphate
  modified_base 8: mod_base = OTHER; note = 2'-deoxy-2'-fluorouridine-3'-phosphate
  modified_base 9: mod_base = OTHER; note = 2'-deoxy-2'-fluoroadenosine-3'-phosphate
  modified_base 10: mod_base = OTHER; note = 2'-O-methylguanosine-3'-phosphate
  modified_base 11: mod_base = OTHER; note = 2'-O-methyluridine-3'-phosphate
  modified_base 12: mod_base = OTHER; note = 2'-O-methylcytidine-3'-phosphate
  modified_base 13: mod_base = OTHER; note = 2'-O-methyluridine-3'-phosphate
  modified_base 14: mod_base = OTHER; note = 2'-deoxy-2'-fluorouridine-3'-phosphate
  modified_base 15: mod_base = OTHER; note = 2'-O-methylcytidine-3'-phosphate
  modified_base 16: mod_base = OTHER; note = 2'-deoxy-2'-fluoroadenosine-3'-phosphate
  modified_base 17: mod_base = OTHER; note = 2'-O-methyladenosine-3'-phosphate
  modified_base 18: mod_base = OTHER; note = 2'-O-methyluridine-3'-phosphate
  modified_base 19: mod_base = OTHER; note = 2'-O-methylguanosine-3'-phosphate
  modified_base 20: mod_base = OTHER; note = 2'-O-methylguanosine-3'-phosphate
  modified_base 21: mod_base = OTHER; note = 2'-O-methylcytidine-3'-phosphorothioate
  modified_base 22: mod_base = OTHER; note = 2'-O-methyluridine-3'-phosphorothioate
  modified_base 23: mod_base = OTHER; note = 2'-O-methylcytidine
attgatatagtcttcaatggctc

SEQ ID NO: 502 - RNA, 23 nt, synthetic construct
  source 1..23: mol_type = other RNA
  modified_base 1: mod_base = OTHER; note = 2'-O-methyladenosine-3'-phosphorothioate
  modified_base 2: mod_base = OTHER; note = 2'-deoxy-2'-fluoroadenosine-3'-phosphorothioate
  modified_base 3: mod_base = OTHER; note = 2'-O-methyluridine-3'-phosphate
  modified_base 4: mod_base = OTHER; note = 2'-O-methylguanosine-3'-phosphate
  modified_base 5: mod_base = OTHER; note = 2'-O-methyluridine-3'-phosphate
  modified_base 6: mod_base = OTHER; note = 2'-deoxy-2'-fluoroguanosine-3'-phosphate
  modified_base 7: mod_base = OTHER; note = 2'-O-methyluridine-3'-phosphate
  modified_base 8: mod_base = OTHER; note = 2'-deoxy-2'-fluoroguanosine-3'-phosphate
  modified_base 9: mod_base = OTHER; note = 2'-deoxy-2'-fluoroguanosine-3'-phosphate
  modified_base 10: mod_base = OTHER; note = 2'-O-methylcytidine-3'-phosphate
  modified_base 11: mod_base = OTHER; note = 2'-O-methyladenosine-3'-phosphate
  modified_base 12: mod_base = OTHER; note = 2'-O-methyluridine-3'-phosphate
  modified_base 13: mod_base = OTHER; note = 2'-O-methyluridine-3'-phosphate
  modified_base 14: mod_base = OTHER; note = 2'-deoxy-2'-fluorouridine-3'-phosphate
  modified_base 15: mod_base = OTHER; note = 2'-O-methyluridine-3'-phosphate
  modified_base 16: mod_base = OTHER; note = 2'-deoxy-2'-fluorocytidine-3'-phosphate
  modified_base 17: mod_base = OTHER; note = 2'-O-methyluridine-3'-phosphate
  modified_base 18: mod_base = OTHER; note = 2'-O-methyluridine-3'-phosphate
  modified_base 19: mod_base = OTHER; note = 2'-O-methyladenosine-3'-phosphate
  modified_base 20: mod_base = OTHER; note = 2'-O-methylcytidine-3'-phosphate
  modified_base 21: mod_base = OTHER; note = 2'-O-methyladenosine-3'-phosphorothioate
  modified_base 22: mod_base = OTHER; note = 2'-O-methylcytidine-3'-phosphorothioate
  modified_base 23: mod_base = OTHER; note = 2'-O-methyluridine
aatgtgtggcattttcttacact

SEQ ID NO: 503 - RNA, 23 nt, synthetic construct
  source 1..23: mol_type = other RNA
  modified_base 1: mod_base = OTHER; note = 2'-O-methyladenosine-3'-phosphorothioate
  modified_base 2: mod_base = OTHER; note = 2'-deoxy-2'-fluorouridine-3'-phosphorothioate
  modified_base 3: mod_base = OTHER; note = 2'-O-methylguanosine-3'-phosphate
  modified_base 4: mod_base = OTHER; note = 2'-O-methyluridine-3'-phosphate
  modified_base 5: mod_base = OTHER; note = 2'-O-methyladenosine-3'-phosphate
  modified_base 6: mod_base = OTHER; note = 2'-deoxy-2'-fluorocytidine-3'-phosphate
  modified_base 7: mod_base = OTHER; note = 2'-O-methylcytidine-3'-phosphate
  modified_base 8: mod_base = OTHER; note = 2'-deoxy-2'-fluorouridine-3'-phosphate
  modified_base 9: mod_base = OTHER; note = 2'-deoxy-2'-fluorocytidine-3'-phosphate
  modified_base 10: mod_base = OTHER; note = 2'-O-methylcytidine-3'-phosphate
  modified_base 11: mod_base = OTHER; note = 2'-O-methyladenosine-3'-phosphate
  modified_base 12: mod_base = OTHER; note = 2'-O-methyluridine-3'-phosphate
  modified_base 13: mod_base = OTHER; note = 2'-O-methyluridine-3'-phosphate
  modified_base 14: mod_base = OTHER; note = 2'-deoxy-2'-fluorouridine-3'-phosphate
  modified_base 15: mod_base = OTHER; note = 2'-O-methyluridine-3'-phosphate
  modified_base 16: mod_base = OTHER; note = 2'-deoxy-2'-fluoroguanosine-3'-phosphate
  modified_base 17: mod_base = OTHER; note = 2'-O-methylguanosine-3'-phosphate
  modified_base 18: mod_base = OTHER; note = 2'-O-methylcytidine-3'-phosphate
  modified_base 19: mod_base = OTHER; note = 2'-O-methyladenosine-3'-phosphate
  modified_base 20: mod_base = OTHER; note = 2'-O-methyluridine-3'-phosphate
  modified_base 21: mod_base = OTHER; note = 2'-O-methylguanosine-3'-phosphorothioate
  modified_base 22: mod_base = OTHER; note = 2'-O-methyluridine-3'-phosphorothioate
  modified_base 23: mod_base = OTHER; note = 2'-O-methylguanosine
atgtacctccattttggcatgtg

SEQ ID NO: 504 - RNA, 23 nt, synthetic construct
  source 1..23: mol_type = other RNA
  modified_base 1: mod_base = OTHER; note = 2'-O-methyladenosine-3'-phosphorothioate
  modified_base 2: mod_base = OTHER; note = 2'-deoxy-2'-fluorouridine-3'-phosphorothioate
  modified_base 3: mod_base = OTHER; note = 2'-O-methyluridine-3'-phosphate
  modified_base 4: mod_base = OTHER; note = 2'-O-methyluridine-3'-phosphate
  modified_base 5: mod_base = OTHER; note = 2'-O-methylcytidine-3'-phosphate
  modified_base 6: mod_base = OTHER; note = 2'-deoxy-2'-fluorocytidine-3'-phosphate
  modified_base 7: mod_base = OTHER; note = 2'-O-methyladenosine-3'-phosphate
  modified_base 8: mod_base = OTHER; note = 2'-deoxy-2'-fluorouridine-3'-phosphate
  modified_base 9: mod_base = OTHER; note = 2'-deoxy-2'-fluorocytidine-3'-phosphate
  modified_base 10: mod_base = OTHER; note = 2'-O-methylcytidine-3'-phosphate
  modified_base 11: mod_base = OTHER; note = 2'-O-methyladenosine-3'-phosphate
  modified_base 12: mod_base = OTHER; note = 2'-O-methyluridine-3'-phosphate
  modified_base 13: mod_base = OTHER; note = 2'-O-methyluridine-3'-phosphate
  modified_base 14: mod_base = OTHER; note = 2'-deoxy-2'-fluoroadenosine-3'-phosphate
  modified_base 15: mod_base = OTHER; note = 2'-O-methylguanosine-3'-phosphate
  modified_base 16: mod_base = OTHER; note = 2'-deoxy-2'-fluoroadenosine-3'-phosphate
  modified_base 17: mod_base = OTHER; note = 2'-O-methyladenosine-3'-phosphate
  modified_base 18: mod_base = OTHER; note = 2'-O-methyluridine-3'-phosphate
  modified_base 19: mod_base = OTHER; note = 2'-O-methylcytidine-3'-phosphate
  modified_base 20: mod_base = OTHER; note = 2'-O-methyladenosine-3'-phosphate
  modified_base 21: mod_base = OTHER; note = 2'-O-methylcytidine-3'-phosphorothioate
  modified_base 22: mod_base = OTHER; note = 2'-O-methyluridine-3'-phosphorothioate
  modified_base 23: mod_base = OTHER; note = 2'-O-methylguanosine
atttccatccattagaatcactg

SEQ ID NO: 505 - RNA, 23 nt, synthetic construct
  source 1..23: mol_type = other RNA
  modified_base 1: mod_base = OTHER; note = 2'-O-methyladenosine-3'-phosphorothioate
  modified_base 2: mod_base = OTHER; note = 2'-deoxy-2'-fluoroguanosine-3'-phosphorothioate
  modified_base 3: mod_base = OTHER; note = 2'-O-methylcytidine-3'-phosphate
  modified_base 4: mod_base = OTHER; note = 2'-O-methyladenosine-3'-phosphate
  modified_base 5: mod_base = OTHER; note = 2'-O-methylcytidine-3'-phosphate
  modified_base 6: mod_base = OTHER; note = 2'-deoxy-2'-fluoroadenosine-3'-phosphate
  modified_base 7: mod_base = OTHER; note = 2'-O-methylcytidine-3'-phosphate
  modified_base 8: mod_base = OTHER; note = 2'-deoxy-2'-fluoroadenosine-3'-phosphate
  modified_base 9: mod_base = OTHER; note = 2'-deoxy-2'-fluoroadenosine-3'-phosphate
  modified_base 10: mod_base = OTHER; note = 2'-O-methyladenosine-3'-phosphate
  modified_base 11: mod_base = OTHER; note = 2'-O-methylcytidine-3'-phosphate
  modified_base 12: mod_base = OTHER; note = 2'-O-methyladenosine-3'-phosphate
  modified_base 13: mod_base = OTHER; note = 2'-O-methylcytidine-3'-phosphate
  modified_base 14: mod_base = OTHER; note = 2'-deoxy-2'-fluorouridine-3'-phosphate
  modified_base 15: mod_base = OTHER; note = 2'-O-methyluridine-3'-phosphate
  modified_base 16: mod_base = OTHER; note = 2'-deoxy-2'-fluorouridine-3'-phosphate
  modified_base 17: mod_base = OTHER; note = 2'-O-methylcytidine-3'-phosphate
  modified_base 18: mod_base = OTHER; note = 2'-O-methylcytidine-3'-phosphate
  modified_base 19: mod_base = OTHER; note = 2'-O-methyladenosine-3'-phosphate
  modified_base 20: mod_base = OTHER; note = 2'-O-methyluridine-3'-phosphate
  modified_base 21: mod_base = OTHER; note = 2'-O-methylcytidine-3'-phosphorothioate
  modified_base 22: mod_base = OTHER; note = 2'-O-methylcytidine-3'-phosphorothioate
  modified_base 23: mod_base = OTHER; note = 2'-O-methyladenosine
agcacacaaacactttccatcca

SEQ ID NO: 506 - RNA, 23 nt, synthetic construct
  source 1..23: mol_type = other RNA
  modified_base 1: mod_base = OTHER; note = 2'-O-methyladenosine-3'-phosphorothioate
  modified_base 2: mod_base = OTHER; note = 2'-deoxy-2'-fluorouridine-3'-phosphorothioate
  modified_base 3: mod_base = OTHER; note = 2'-O-methyluridine-3'-phosphate
  modified_base 4: mod_base = OTHER; note = 2'-O-methyluridine-3'-phosphate
  modified_base 5: mod_base = OTHER; note = 2'-O-methylguanosine-3'-phosphate
  modified_base 6: mod_base = OTHER; note = 2'-deoxy-2'-fluoroadenosine-3'-phosphate
  modified_base 7: mod_base = OTHER; note = 2'-O-methyladenosine-3'-phosphate
  modified_base 8: mod_base = OTHER; note = 2'-deoxy-2'-fluorouridine-3'-phosphate
  modified_base 9: mod_base = OTHER; note = 2'-deoxy-2'-fluoroguanosine-3'-phosphate
  modified_base 10: mod_base = OTHER; note = 2'-O-methylguanosine-3'-phosphate
  modified_base 11: mod_base = OTHER; note = 2'-O-methylguanosine-3'-phosphate
  modified_base 12: mod_base = OTHER; note = 2'-O-methylcytidine-3'-phosphate
  modified_base 13: mod_base = OTHER; note = 2'-O-methyladenosine-3'-phosphate
  modified_base 14: mod_base = OTHER; note = 2'-deoxy-2'-fluoroguanosine-3'-phosphate
  modified_base 15: mod_base = OTHER; note = 2'-O-methylguanosine-3'-phosphate
  modified_base 16: mod_base = OTHER; note = 2'-deoxy-2'-fluorocytidine-3'-phosphate
  modified_base 17: mod_base = OTHER; note = 2'-O-methyladenosine-3'-phosphate
  modified_base 18: mod_base = OTHER; note = 2'-O-methylcytidine-3'-phosphate
  modified_base 19: mod_base = OTHER; note = 2'-O-methyladenosine-3'-phosphate
  modified_base 20: mod_base = OTHER; note = 2'-O-methylcytidine-3'-phosphate
  modified_base 21: mod_base = OTHER; note = 2'-O-methyladenosine-3'-phosphorothioate
  modified_base 22: mod_base = OTHER; note = 2'-O-methyladenosine-3'-phosphorothioate
  modified_base 23: mod_base = OTHER; note = 2'-O-methyladenosine
atttgaatgggcaggcacacaaa

SEQ ID NO: 507 - RNA, 23 nt, synthetic construct
  source 1..23: mol_type = other RNA
  modified_base 1: mod_base = OTHER; note = 2'-O-methyladenosine-3'-phosphorothioate
  modified_base 2: mod_base = OTHER; note = 2'-deoxy-2'-fluoroadenosine-3'-phosphorothioate
  modified_base 3: mod_base = OTHER; note = 2'-O-methyladenosine-3'-phosphate
  modified_base 4: mod_base = OTHER; note = 2'-O-methyluridine-3'-phosphate
  modified_base 5: mod_base = OTHER; note = 2'-O-methyluridine-3'-phosphate
  modified_base 6: mod_base = OTHER; note = 2'-deoxy-2'-fluorocytidine-3'-phosphate
  modified_base 7: mod_base = OTHER; note = 2'-O-methylcytidine-3'-phosphate
  modified_base 8: mod_base = OTHER; note = 2'-deoxy-2'-fluorocytidine-3'-phosphate
  modified_base 9: mod_base = OTHER; note = 2'-deoxy-2'-fluorouridine-3'-phosphate
  modified_base 10: mod_base = OTHER; note = 2'-O-methylcytidine-3'-phosphate
  modified_base 11: mod_base = OTHER; note = 2'-O-methyladenosine-3'-phosphate
  modified_base 12: mod_base = OTHER; note = 2'-O-methyladenosine-3'-phosphate
  modified_base 13: mod_base = OTHER; note = 2'-O-methyladenosine-3'-phosphate
  modified_base 14: mod_base = OTHER; note = 2'-deoxy-2'-fluorouridine-3'-phosphate
  modified_base 15: mod_base = OTHER; note = 2'-O-methyluridine-3'-phosphate
  modified_base 16: mod_base = OTHER; note = 2'-deoxy-2'-fluorouridine-3'-phosphate
  modified_base 17: mod_base = OTHER; note = 2'-O-methylguanosine-3'-phosphate
  modified_base 18: mod_base = OTHER; note = 2'-O-methyladenosine-3'-phosphate
  modified_base 19: mod_base = OTHER; note = 2'-O-methyladenosine-3'-phosphate
  modified_base 20: mod_base = OTHER; note = 2'-O-methyluridine-3'-phosphate
  modified_base 21: mod_base = OTHER; note = 2'-O-methylguanosine-3'-phosphorothioate
  modified_base 22: mod_base = OTHER; note = 2'-O-methylguanosine-3'-phosphorothioate
  modified_base 23: mod_base = OTHER; note = 2'-O-methylguanosine
aaattccctcaaatttgaatggg

SEQ ID NO: 508 - RNA, 23 nt, synthetic construct
  source 1..23: mol_type = other RNA
  modified_base 1: mod_base = OTHER; note = 2'-O-methyladenosine-3'-phosphorothioate
  modified_base 2: mod_base = OTHER; note = 2'-deoxy-2'-fluorouridine-3'-phosphorothioate
  modified_base 3: mod_base = OTHER; note = 2'-O-methyluridine-3'-phosphate
  modified_base 4: mod_base = OTHER; note = 2'-O-methylguanosine-3'-phosphate
  modified_base 5: mod_base = OTHER; note = 2'-O-methyluridine-3'-phosphate
  modified_base 6: mod_base = OTHER; note = 2'-deoxy-2'-fluorouridine-3'-phosphate
  modified_base 7: mod_base = OTHER; note = 2'-O-methyluridine-3'-phosphate
  modified_base 8: mod_base = OTHER; note = 2'-deoxy-2'-fluoroadenosine-3'-phosphate
  modified_base 9: mod_base = OTHER; note = 2'-deoxy-2'-fluorocytidine-3'-phosphate
  modified_base 10: mod_base = OTHER; note = 2'-O-methyluridine-3'-phosphate
  modified_base 11: mod_base = OTHER; note = 2'-O-methylguanosine-3'-phosphate
  modified_base 12: mod_base = OTHER; note = 2'-O-methyladenosine-3'-phosphate
  modified_base 13: mod_base = OTHER; note = 2'-O-methyluridine-3'-phosphate
  modified_base 14: mod_base = OTHER; note = 2'-deoxy-2'-fluorouridine-3'-phosphate
  modified_base 15: mod_base = OTHER; note = 2'-O-methyluridine-3'-phosphate
  modified_base 16: mod_base = OTHER; note = 2'-deoxy-2'-fluorocytidine-3'-phosphate
  modified_base 17: mod_base = OTHER; note = 2'-O-methyladenosine-3'-phosphate
  modified_base 18: mod_base = OTHER; note = 2'-O-methylcytidine-3'-phosphate
  modified_base 19: mod_base = OTHER; note = 2'-O-methyladenosine-3'-phosphate
  modified_base 20: mod_base = OTHER; note = 2'-O-methylguanosine-3'-phosphate
  modified_base 21: mod_base = OTHER; note = 2'-O-methylguanosine-3'-phosphorothioate
  modified_base 22: mod_base = OTHER; note = 2'-O-methylcytidine-3'-phosphorothioate
  modified_base 23: mod_base = OTHER; note = 2'-O-methyladenosine
attgtttactgatttcacaggca

SEQ ID NO: 509 - RNA, 23 nt, synthetic construct
  source 1..23: mol_type = other RNA
  modified_base 1: mod_base = OTHER; note = 2'-O-methyladenosine-3'-phosphorothioate
  modified_base 2: mod_base = OTHER; note = 2'-deoxy-2'-fluorocytidine-3'-phosphorothioate
  modified_base 3: mod_base = OTHER; note = 2'-O-methyluridine-3'-phosphate
  modified_base 4: mod_base = OTHER; note = 2'-O-methylguanosine-3'-phosphate
  modified_base 5: mod_base = OTHER; note = 2'-O-methylguanosine-3'-phosphate
  modified_base 6: mod_base = OTHER; note = 2'-deoxy-2'-fluorocytidine-3'-phosphate
  modified_base 7: mod_base = OTHER; note = 2'-O-methyladenosine-3'-phosphate
  modified_base 8: mod_base = OTHER; note = 2'-deoxy-2'-fluoroadenosine-3'-phosphate
  modified_base 9: mod_base = OTHER; note = 2'-deoxy-2'-fluorouridine-3'-phosphate
  modified_base 10: mod_base = OTHER; note = 2'-O-methylcytidine-3'-phosphate
  modified_base 11: mod_base = OTHER; note = 2'-O-methylcytidine-3'-phosphate
  modified_base 12: mod_base = OTHER; note = 2'-O-methyluridine-3'-phosphate
  modified_base 13: mod_base = OTHER; note = 2'-O-methyluridine-3'-phosphate
  modified_base 14: mod_base = OTHER; note = 2'-deoxy-2'-fluorocytidine-3'-phosphate
  modified_base 15: mod_base = OTHER; note = 2'-O-methyladenosine-3'-phosphate
  modified_base 16: mod_base = OTHER; note = 2'-deoxy-2'-fluoroguanosine-3'-phosphate
  modified_base 17: mod_base = OTHER; note = 2'-O-methyladenosine-3'-phosphate
  modified_base 18: mod_base = OTHER; note = 2'-O-methyladenosine-3'-phosphate
  modified_base 19: mod_base = OTHER; note = 2'-O-methyladenosine-3'-phosphate
  modified_base 20: mod_base = OTHER; note = 2'-O-methyluridine-3'-phosphate
  modified_base 21: mod_base = OTHER; note = 2'-O-methyluridine-3'-phosphorothioate
  modified_base 22: mod_base = OTHER; note = 2'-O-methyluridine-3'-phosphorothioate
  modified_base 23: mod_base = OTHER; note = 2'-O-methyluridine
actggcaatccttcagaaatttt

SEQ ID NO: 510 - RNA, 23 nt, synthetic construct
  source 1..23: mol_type = other RNA
  modified_base 1: mod_base = OTHER; note = 2'-O-methyladenosine-3'-phosphorothioate
  modified_base 2: mod_base = OTHER; note = 2'-deoxy-2'-fluoroadenosine-3'-phosphorothioate
  modified_base 3: mod_base = OTHER; note = 2'-O-methylguanosine-3'-phosphate
  modified_base 4: mod_base = OTHER; note = 2'-O-methyladenosine-3'-phosphate
  modified_base 5: mod_base = OTHER; note = 2'-O-methylguanosine-3'-phosphate
  modified_base 6: mod_base = OTHER; note = 2'-deoxy-2'-fluoroadenosine-3'-phosphate
  modified_base 7: mod_base = OTHER; note = 2'-O-methyladenosine-3'-phosphate
  modified_base 8: mod_base = OTHER; note = 2'-deoxy-2'-fluoroguanosine-3'-phosphate
  modified_base 9: mod_base = OTHER; note = 2'-deoxy-2'-fluorocytidine-3'-phosphate
  modified_base 10: mod_base = OTHER; note = 2'-O-methylcytidine-3'-phosphate
  modified_base 11: mod_base = OTHER; note = 2'-O-methyladenosine-3'-phosphate
  modified_base 12: mod_base = OTHER; note = 2'-O-methyladenosine-3'-phosphate
  modified_base 13: mod_base = OTHER; note = 2'-O-methylcytidine-3'-phosphate
  modified_base 14: mod_base = OTHER; note = 2'-deoxy-2'-fluoroadenosine-3'-phosphate
  modified_base 15: mod_base = OTHER; note = 2'-O-methylguanosine-3'-phosphate
  modified_base 16: mod_base = OTHER; note = 2'-deoxy-2'-fluorocytidine-3'-phosphate
  modified_base 17: mod_base = OTHER; note = 2'-O-methyluridine-3'-phosphate
  modified_base 18: mod_base = OTHER; note = 2'-O-methylcytidine-3'-phosphate
  modified_base 19: mod_base = OTHER; note = 2'-O-methyluridine-3'-phosphate
  modified_base 20: mod_base = OTHER; note = 2'-O-methyladenosine-3'-phosphate
  modified_base 21: mod_base = OTHER; note = 2'-O-methyluridine-3'-phosphorothioate
  modified_base 22: mod_base = OTHER; note = 2'-O-methyluridine-3'-phosphorothioate
  modified_base 23: mod_base = OTHER; note = 2'-O-methyluridine
aagagaagccaacagctctattt

SEQ ID NO: 511 - RNA, 23 nt, synthetic construct
  source 1..23: mol_type = other RNA
  modified_base 1: mod_base = OTHER; note = 2'-O-methyladenosine-3'-phosphorothioate
  modified_base 2: mod_base = OTHER; note = 2'-deoxy-2'-fluorouridine-3'-phosphorothioate
  modified_base 3: mod_base = OTHER; note = 2'-O-methyladenosine-3'-phosphate
  modified_base 4: mod_base = OTHER; note = 2'-O-methylguanosine-3'-phosphate
  modified_base 5: mod_base = OTHER; note = 2'-O-methyluridine-3'-phosphate
  modified_base 6: mod_base = OTHER; note = 2'-deoxy-2'-fluoroguanosine-3'-phosphate
  modified_base 7: mod_base = OTHER; note = 2'-O-methyluridine-3'-phosphate
  modified_base 8: mod_base = OTHER; note = 2'-deoxy-2'-fluorouridine-3'-phosphate
  modified_base 9: mod_base = OTHER; note = 2'-deoxy-2'-fluorouridine-3'-phosphate
  modified_base 10: mod_base = OTHER; note = 2'-O-methyluridine-3'-phosphate
  modified_base 11: mod_base = OTHER; note = 2'-O-methylcytidine-3'-phosphate
  modified_base 12: mod_base = OTHER; note = 2'-O-methyluridine-3'-phosphate
  modified_base 13: mod_base = OTHER; note = 2'-O-methyluridine-3'-phosphate
  modified_base 14: mod_base = OTHER; note = 2'-deoxy-2'-fluorocytidine-3'-phosphate
  modified_base 15: mod_base = OTHER; note = 2'-O-methyluridine-3'-phosphate
  modified_base 16: mod_base = OTHER; note = 2'-deoxy-2'-fluorouridine-3'-phosphate
  modified_base 17: mod_base = OTHER; note = 2'-O-methylcytidine-3'-phosphate
  modified_base 18: mod_base = OTHER; note = 2'-O-methylcytidine-3'-phosphate
  modified_base 19: mod_base = OTHER; note = 2'-O-methyladenosine-3'-phosphate
  modified_base 20: mod_base = OTHER; note = 2'-O-methylcytidine-3'-phosphate
  modified_base 21: mod_base = OTHER; note = 2'-O-methyluridine-3'-phosphorothioate
  modified_base 22: mod_base = OTHER; note = 2'-O-methylguanosine-3'-phosphorothioate
  modified_base 23: mod_base = OTHER; note = 2'-O-methylguanosine
atagtgttttcttcttccactgg

SEQ ID NO: 512 - RNA, 23 nt, synthetic construct
  source 1..23: mol_type = other RNA
  modified_base 1: mod_base = OTHER; note = 2'-O-methyladenosine-3'-phosphorothioate
  modified_base 2: mod_base = OTHER; note = 2'-deoxy-2'-fluoroadenosine-3'-phosphorothioate
  modified_base 3: mod_base = OTHER; note = 2'-O-methyluridine-3'-phosphate
  modified_base 4: mod_base = OTHER; note = 2'-O-methylcytidine-3'-phosphate
  modified_base 5: mod_base = OTHER; note = 2'-O-methyluridine-3'-phosphate
  modified_base 6: mod_base = OTHER; note = 2'-deoxy-2'-fluoroguanosine-3'-phosphate
  modified_base 7: mod_base = OTHER; note = 2'-O-methyladenosine-3'-phosphate
  modified_base 8: mod_base = OTHER; note = 2'-deoxy-2'-fluoroadenosine-3'-phosphate
  modified_base 9: mod_base = OTHER; note = 2'-deoxy-2'-fluoroguanosine-3'-phosphate
  modified_base 10: mod_base = OTHER; note = 2'-O-methylguanosine-3'-phosphate
  modified_base 11: mod_base = OTHER; note = 2'-O-methyluridine-3'-phosphate
  modified_base 12: mod_base = OTHER; note = 2'-O-methyladenosine-3'-phosphate
  modified_base 13: mod_base = OTHER; note = 2'-O-methylcytidine-3'-phosphate
  modified_base 14: mod_base = OTHER; note = 2'-deoxy-2'-fluorouridine-3'-phosphate
  modified_base 15: mod_base = OTHER; note = 2'-O-methyladenosine-3'-phosphate
  modified_base 16: mod_base = OTHER; note = 2'-deoxy-2'-fluoroguanosine-3'-phosphate
  modified_base 17: mod_base = OTHER; note = 2'-O-methyluridine-3'-phosphate
  modified_base 18: mod_base = OTHER; note = 2'-O-methylguanosine-3'-phosphate
  modified_base 19: mod_base = OTHER; note = 2'-O-methyluridine-3'-phosphate
  modified_base 20: mod_base = OTHER; note = 2'-O-methyluridine-3'-phosphate
  modified_base 21: mod_base = OTHER; note = 2'-O-methyluridine-3'-phosphorothioate
  modified_base 22: mod_base = OTHER; note = 2'-O-methyluridine-3'-phosphorothioate
  modified_base 23: mod_base = OTHER; note = 2'-O-methylcytidine
aatctgaaggtactagtgttttc

SEQ ID NO: 513 - RNA, 23 nt, synthetic construct
  source 1..23: mol_type = other RNA
  modified_base 1: mod_base = OTHER; note = 2'-O-methyladenosine-3'-phosphorothioate
  modified_base 2: mod_base = OTHER; note = 2'-deoxy-2'-fluoroguanosine-3'-phosphorothioate
  modified_base 3: mod_base = OTHER; note = 2'-O-methylcytidine-3'-phosphate
  modified_base 4: mod_base = OTHER; note = 2'-O-methyladenosine-3'-phosphate
  modified_base 5: mod_base = OTHER; note = 2'-O-methylguanosine-3'-phosphate
  modified_base 6: mod_base = OTHER; note = 2'-deoxy-2'-fluorocytidine-3'-phosphate
  modified_base 7: mod_base = OTHER; note = 2'-O-methyluridine-3'-phosphate
  modified_base 8: mod_base = OTHER; note = 2'-deoxy-2'-fluoroadenosine-3'-phosphate
  modified_base 9: mod_base = OTHER; note = 2'-deoxy-2'-fluoroadenosine-3'-phosphate
  modified_base 10: mod_base = OTHER; note = 2'-O-methylguanosine-3'-phosphate
  modified_base 11: mod_base = OTHER; note = 2'-O-methyladenosine-3'-phosphate
  modified_base 12: mod_base = OTHER; note = 2'-O-methyluridine-3'-phosphate
  modified_base 13: mod_base = OTHER; note = 2'-O-methyluridine-3'-phosphate
  modified_base 14: mod_base = OTHER; note = 2'-deoxy-2'-fluoroadenosine-3'-phosphate
  modified_base 15: mod_base = OTHER; note = 2'-O-methyluridine-3'-phosphate
  modified_base 16: mod_base = OTHER; note = 2'-deoxy-2'-fluorocytidine-3'-phosphate
  modified_base 17: mod_base = OTHER; note = 2'-O-methyluridine-3'-phosphate
  modified_base 18: mod_base = OTHER; note = 2'-O-methyluridine-3'-phosphate
  modified_base 19: mod_base = OTHER; note = 2'-O-methylcytidine-3'-phosphate
  modified_base 20: mod_base = OTHER; note = 2'-O-methyladenosine-3'-phosphate
  modified_base 21: mod_base = OTHER; note = 2'-O-methylguanosine-3'-phosphorothioate
  modified_base 22: mod_base = OTHER; note = 2'-O-methylguanosine-3'-phosphorothioate
  modified_base 23: mod_base = OTHER; note = 2'-O-methylguanosine
agcagctaagattatcttcaggg

SEQ ID NO: 514 - RNA, 23 nt, synthetic construct
  source 1..23: mol_type = other RNA
  modified_base 1: mod_base = OTHER; note = 2'-O-methyladenosine-3'-phosphorothioate
  modified_base 2: mod_base = OTHER; note = 2'-deoxy-2'-fluorouridine-3'-phosphorothioate
  modified_base 3: mod_base = OTHER; note = 2'-O-methylguanosine-3'-phosphate
  modified_base 4: mod_base = OTHER; note = 2'-O-methyluridine-3'-phosphate
  modified_base 5: mod_base = OTHER; note = 2'-O-methyluridine-3'-phosphate
  modified_base 6: mod_base = OTHER; note = 2'-deoxy-2'-fluoroguanosine-3'-phosphate
  modified_base 7: mod_base = OTHER; note = 2'-O-methylcytidine-3'-phosphate
  modified_base 8: mod_base = OTHER; note = 2'-deoxy-2'-fluorouridine-3'-phosphate
  modified_base 9: mod_base = OTHER; note = 2'-deoxy-2'-fluoroadenosine-3'-phosphate
  modified_base 10: mod_base = OTHER; note = 2'-O-methyluridine-3'-phosphate
  modified_base 11: mod_base = OTHER; note = 2'-O-methyluridine-3'-phosphate
  modified_base 12: mod_base = OTHER; note = 2'-O-methyluridine-3'-phosphate
  modified_base 13: mod_base = OTHER; note = 2'-O-methyladenosine-3'-phosphate
  modified_base 14: mod_base = OTHER; note = 2'-deoxy-2'-fluorocytidine-3'-phosphate
  modified_base 15: mod_base = OTHER; note = 2'-O-methyluridine-3'-phosphate
  modified_base 16: mod_base = OTHER; note = 2'-deoxy-2'-fluorouridine-3'-phosphate
  modified_base 17: mod_base = OTHER; note = 2'-O-methylguanosine-3'-phosphate
  modified_base 18: mod_base = OTHER; note = 2'-O-methylguanosine-3'-phosphate
  modified_base 19: mod_base = OTHER; note = 2'-O-methylcytidine-3'-phosphate
  modified_base 20: mod_base = OTHER; note = 2'-O-methyladenosine-3'-phosphate
  modified_base 21: mod_base = OTHER; note = 2'-O-methylguanosine-3'-phosphorothioate
  modified_base 22: mod_base = OTHER; note = 2'-O-methylcytidine-3'-phosphorothioate
  modified_base 23: mod_base = OTHER; note = 2'-O-methyluridine
atgttgctatttacttggcagct

SEQ ID NO: 515 - RNA, 23 nt, synthetic construct
  source 1..23: mol_type = other RNA
  modified_base 1: mod_base = OTHER; note = 2'-O-methyladenosine-3'-phosphorothioate
  modified_base 2: mod_base = OTHER; note = 2'-deoxy-2'-fluoroguanosine-3'-phosphorothioate
  modified_base 3: mod_base = OTHER; note = 2'-O-methyluridine-3'-phosphate
  modified_base 4: mod_base = OTHER; note = 2'-O-methyluridine-3'-phosphate
  modified_base 5: mod_base = OTHER; note = 2'-O-methylguanosine-3'-phosphate
  modified_base 6: mod_base = OTHER; note = 2'-deoxy-2'-fluoroguanosine-3'-phosphate
  modified_base 7: mod_base = OTHER; note = 2'-O-methyluridine-3'-phosphate
  modified_base 8: mod_base = OTHER; note = 2'-deoxy-2'-fluoroadenosine-3'-phosphate
  modified_base 9: mod_base = OTHER; note = 2'-deoxy-2'-fluoroguanosine-3'-phosphate
  modified_base 10: mod_base = OTHER; note = 2'-O-methylguanosine-3'-phosphate
  modified_base 11: mod_base = OTHER; note = 2'-O-methyladenosine-3'-phosphate
  modified_base 12: mod_base = OTHER; note = 2'-O-methyluridine-3'-phosphate
  modified_base 13: mod_base = OTHER; note = 2'-O-methyluridine-3'-phosphate
  modified_base 14: mod_base = OTHER; note = 2'-deoxy-2'-fluorouridine-3'-phosphate
  modified_base 15: mod_base = OTHER; note = 2'-O-methyluridine-3'-phosphate
  modified_base 16: mod_base = OTHER; note = 2'-deoxy-2'-fluorocytidine-3'-phosphate
  modified_base 17: mod_base = OTHER; note = 2'-O-methyladenosine-3'-phosphate
  modified_base 18: mod_base = OTHER; note = 2'-O-methyluridine-3'-phosphate
  modified_base 19: mod_base = OTHER; note = 2'-O-methylguanosine-3'-phosphate
  modified_base 20: mod_base = OTHER; note = 2'-O-methyladenosine-3'-phosphate
  modified_base 21: mod_base = OTHER; note = 2'-O-methyladenosine-3'-phosphorothioate
  modified_base 22: mod_base = OTHER; note = 2'-O-methylguanosine-3'-phosphorothioate
  modified_base 23: mod_base = OTHER; note = 2'-O-methylcytidine
agttggtaggattttcatgaagc

SEQ ID NO: 516 - RNA, 23 nt, synthetic construct
  source 1..23: mol_type = other RNA
  modified_base 1: mod_base = OTHER; note = 2'-O-methyladenosine-3'-phosphorothioate
  modified_base 2: mod_base = OTHER; note = 2'-deoxy-2'-fluoroadenosine-3'-phosphorothioate
  modified_base 3: mod_base = OTHER; note = 2'-O-methyladenosine-3'-phosphate
  modified_base 4: mod_base = OTHER; note = 2'-O-methylguanosine-3'-phosphate
  modified_base 5: mod_base = OTHER; note = 2'-O-methyladenosine-3'-phosphate
  modified_base 6: mod_base = OTHER; note = 2'-deoxy-2'-fluoroguanosine-3'-phosphate
  modified_base 7: mod_base = OTHER; note = 2'-O-methyladenosine-3'-phosphate
  modified_base 8: mod_base = OTHER; note = 2'-deoxy-2'-fluoroguanosine-3'-phosphate
  modified_base 9: mod_base = OTHER; note = 2'-deoxy-2'-fluoroadenosine-3'-phosphate
  modified_base 10: mod_base = OTHER; note = 2'-O-methyladenosine-3'-phosphate
  modified_base 11: mod_base = OTHER; note = 2'-O-methylguanosine-3'-phosphate
  modified_base 12: mod_base = OTHER; note = 2'-O-methyladenosine-3'-phosphate
  modified_base 13: mod_base = OTHER; note = 2'-O-methylguanosine-3'-phosphate
  modified_base 14: mod_base = OTHER; note = 2'-deoxy-2'-fluoroadenosine-3'-phosphate
  modified_base 15: mod_base = OTHER; note = 2'-O-methylcytidine-3'-phosphate
  modified_base 16: mod_base = OTHER; note = 2'-deoxy-2'-fluorouridine-3'-phosphate
  modified_base 17: mod_base = OTHER; note = 2'-O-methyluridine-3'-phosphate
  modified_base 18: mod_base = OTHER; note = 2'-O-methylcytidine-3'-phosphate
  modified_base 19: mod_base = OTHER; note = 2'-O-methyladenosine-3'-phosphate
  modified_base 20: mod_base = OTHER; note = 2'-O-methylguanosine-3'-phosphate
  modified_base 21: mod_base = OTHER; note = 2'-O-methyladenosine-3'-phosphorothioate
  modified_base 22: mod_base = OTHER; note = 2'-O-methylguanosine-3'-phosphorothioate
  modified_base 23: mod_base = OTHER; note = 2'-O-methylguanosine
aaagagagaagagacttcagagg

SEQ ID NO: 517 - RNA, 23 nt, synthetic construct
  source 1..23: mol_type = other RNA
  modified_base 1: mod_base = OTHER; note = 2'-O-methyladenosine-3'-phosphorothioate
  modified_base 2: mod_base = OTHER; note = 2'-deoxy-2'-fluoroadenosine-3'-phosphorothioate
  modified_base 3: mod_base = OTHER; note = 2'-O-methyladenosine-3'-phosphate
  modified_base 4: mod_base = OTHER; note = 2'-O-methyluridine-3'-phosphate
  modified_base 5: mod_base = OTHER; note = 2'-O-methyluridine-3'-phosphate
  modified_base 6: mod_base = OTHER; note = 2'-deoxy-2'-fluoroadenosine-3'-phosphate
  modified_base 7: mod_base = OTHER; note = 2'-O-methyluridine-3'-phosphate
  modified_base 8: mod_base = OTHER; note = 2'-deoxy-2'-fluoroadenosine-3'-phosphate
  modified_base 9: mod_base = OTHER; note = 2'-deoxy-2'-fluoroguanosine-3'-phosphate
  modified_base 10: mod_base = OTHER; note = 2'-O-methyladenosine-3'-phosphate
  modified_base 11: mod_base = OTHER; note = 2'-O-methylcytidine-3'-phosphate
  modified_base 12: mod_base = OTHER; note = 2'-O-methylcytidine-3'-phosphate
  modified_base 13: mod_base = OTHER; note = 2'-O-methyluridine-3'-phosphate
  modified_base 14: mod_base = OTHER; note = 2'-deoxy-2'-fluoroadenosine-3'-phosphate
  modified_base 15: mod_base = OTHER; note = 2'-O-methyladenosine-3'-phosphate
  modified_base 16: mod_base = OTHER; note = 2'-deoxy-2'-fluoroguanosine-3'-phosphate
  modified_base 17: mod_base = OTHER; note = 2'-O-methyladenosine-3'-phosphate
  modified_base 18: mod_base = OTHER; note = 2'-O-methylguanosine-3'-phosphate
  modified_base 19: mod_base = OTHER; note = 2'-O-methyladenosine-3'-phosphate
  modified_base 20: mod_base = OTHER; note = 2'-O-methylguanosine-3'-phosphate
  modified_base 21: mod_base = OTHER; note = 2'-O-methyladenosine-3'-phosphorothioate
  modified_base 22: mod_base = OTHER; note = 2'-O-methyladenosine-3'-phosphorothioate
  modified_base 23: mod_base = OTHER; note = 2'-O-methylguanosine
aaattatagacctaagagagaag

SEQ ID NO: 518 - RNA, 23 nt, synthetic construct
  source 1..23: mol_type = other RNA
  modified_base 1: mod_base = OTHER; note = 2'-O-methyladenosine-3'-phosphorothioate
  modified_base 2: mod_base = OTHER; note = 2'-deoxy-2'-fluoroadenosine-3'-phosphorothioate
  modified_base 3: mod_base = OTHER; note = 2'-O-methyluridine-3'-phosphate
  modified_base 4: mod_base = OTHER; note = 2'-O-methylcytidine-3'-phosphate
  modified_base 5: mod_base = OTHER; note = 2'-O-methyladenosine-3'-phosphate
  modified_base 6: mod_base = OTHER; note = 2'-deoxy-2'-fluorocytidine-3'-phosphate
  modified_base 7: mod_base = OTHER; note = 2'-O-methyladenosine-3'-phosphate
  modified_base 8: mod_base = OTHER; note = 2'-deoxy-2'-fluoroguanosine-3'-phosphate
  modified_base 9: mod_base = OTHER; note = 2'-deoxy-2'-fluoroguanosine-3'-phosphate
  modified_base 10: mod_base = OTHER; note = 2'-O-methyladenosine-3'-phosphate
  modified_base 11: mod_base = OTHER; note = 2'-O-methylguanosine-3'-phosphate
  modified_base 12: mod_base = OTHER; note = 2'-O-methyluridine-3'-phosphate
  modified_base 13: mod_base = OTHER; note = 2'-O-methyluridine-3'-phosphate
  modified_base 14: mod_base = OTHER; note = 2'-deoxy-2'-fluorouridine-3'-phosphate
  modified_base 15: mod_base = OTHER; note = 2'-O-methyladenosine-3'-phosphate
  modified_base 16: mod_base = OTHER; note = 2'-deoxy-2'-fluoroadenosine-3'-phosphate
  modified_base 17: mod_base = OTHER; note = 2'-O-methylguanosine-3'-phosphate
  modified_base 18: mod_base = OTHER; note = 2'-O-methylguanosine-3'-phosphate
  modified_base 19: mod_base = OTHER; note = 2'-O-methyladenosine-3'-phosphate
  modified_base 20: mod_base = OTHER; note = 2'-O-methyladenosine-3'-phosphate
  modified_base 21: mod_base = OTHER; note = 2'-O-methylguanosine-3'-phosphorothioate
  modified_base 22: mod_base = OTHER; note = 2'-O-methyladenosine-3'-phosphorothioate
  modified_base 23: mod_base = OTHER; note = 2'-O-methyladenosine
aatcacaggagtttaaggaagaa

SEQ ID NO: 519 - RNA, 23 nt, synthetic construct
  source 1..23: mol_type = other RNA
  modified_base 1: mod_base = OTHER; note = 2'-O-methyladenosine-3'-phosphorothioate
  modified_base 2: mod_base = OTHER; note = 2'-deoxy-2'-fluoroadenosine-3'-phosphorothioate
  modified_base 3: mod_base = OTHER; note = 2'-O-methylcytidine-3'-phosphate
  modified_base 4: mod_base = OTHER; note = 2'-O-methyluridine-3'-phosphate
  modified_base 5: mod_base = OTHER; note = 2'-O-methylguanosine-3'-phosphate
  modified_base 6: mod_base = OTHER; note = 2'-deoxy-2'-fluorouridine-3'-phosphate
  modified_base 7: mod_base = OTHER; note = 2'-O-methyluridine-3'-phosphate
  modified_base 8: mod_base = OTHER; note = 2'-deoxy-2'-fluoroguanosine-3'-phosphate
  modified_base 9: mod_base = OTHER; note = 2'-deoxy-2'-fluoroadenosine-3'-phosphate
  modified_base 10: mod_base = OTHER; note = 2'-O-methylcytidine-3'-phosphate
  modified_base 11: mod_base = OTHER; note = 2'-O-methyluridine-3'-phosphate
  modified_base 12: mod_base = OTHER; note = 2'-O-methyluridine-3'-phosphate
  modified_base 13: mod_base = OTHER; note = 2'-O-methylcytidine-3'-phosphate
  modified_base 14: mod_base = OTHER; note = 2'-deoxy-2'-fluorouridine-3'-phosphate
  modified_base 15: mod_base = OTHER; note = 2'-O-methylcytidine-3'-phosphate
  modified_base 16: mod_base = OTHER; note = 2'-deoxy-2'-fluoroadenosine-3'-phosphate
  modified_base 17: mod_base = OTHER; note = 2'-O-methyluridine-3'-phosphate
  modified_base 18: mod_base = OTHER; note = 2'-O-methyluridine-3'-phosphate
  modified_base 19: mod_base = OTHER; note = 2'-O-methyladenosine-3'-phosphate
  modified_base 20: mod_base = OTHER; note = 2'-O-methylguanosine-3'-phosphate
  modified_base 21: mod_base = OTHER; note = 2'-O-methylguanosine-3'-phosphorothioate
  modified_base 22: mod_base = OTHER; note = 2'-O-methylguanosine-3'-phosphorothioate
  modified_base 23: mod_base = OTHER; note = 2'-O-methyladenosine
aactgttgacttctcattaggga

SEQ ID NO: 520 - RNA, 23 nt, synthetic construct
  source 1..23: mol_type = other RNA
  modified_base 1: mod_base = OTHER; note = 2'-O-methyladenosine-3'-phosphorothioate
  modified_base 2: mod_base = OTHER; note = 2'-deoxy-2'-fluorouridine-3'-phosphorothioate
  modified_base 3: mod_base = OTHER; note = 2'-O-methyluridine-3'-phosphate
  modified_base 4: mod_base = OTHER; note = 2'-O-methylcytidine-3'-phosphate
  modified_base 5: mod_base = OTHER; note = 2'-O-methyluridine-3'-phosphate
  modified_base 6: mod_base = OTHER; note = 2'-deoxy-2'-fluoroguanosine-3'-phosphate
  modified_base 7: mod_base = OTHER; note = 2'-O-methylguanosine-3'-phosphate
  modified_base 8: mod_base = OTHER; note = 2'-deoxy-2'-fluorocytidine-3'-phosphate
  modified_base 9: mod_base = OTHER; note = 2'-deoxy-2'-fluoroguanosine-3'-phosphate
  modified_base 10: mod_base = OTHER; note = 2'-O-methyluridine-3'-phosphate
  modified_base 11: mod_base = OTHER; note = 2'-O-methyladenosine-3'-phosphate
  modified_base 12: mod_base = OTHER; note = 2'-O-methyluridine-3'-phosphate
  modified_base 13: mod_base = OTHER; note = 2'-O-methyluridine-3'-phosphate
  modified_base 14: mod_base = OTHER; note = 2'-deoxy-2'-fluorouridine-3'-phosphate
  modified_base 15: mod_base = OTHER; note = 2'-O-methylcytidine-3'-phosphate
  modified_base 16: mod_base = OTHER; note = 2'-deoxy-2'-fluoroadenosine-3'-phosphate
  modified_base 17: mod_base = OTHER; note = 2'-O-methylcytidine-3'-phosphate
  modified_base 18: mod_base = OTHER; note = 2'-O-methyluridine-3'-phosphate
  modified_base 19: mod_base = OTHER; note = 2'-O-methylguanosine-3'-phosphate
  modified_base 20: mod_base = OTHER; note = 2'-O-methyluridine-3'-phosphate
  modified_base 21: mod_base = OTHER; note = 2'-O-methyluridine-3'-phosphorothioate
  modified_base 22: mod_base = OTHER; note = 2'-O-methylguanosine-3'-phosphorothioate
  modified_base 23: mod_base = OTHER; note = 2'-O-methyladenosine
attctggcgtatttcactgttga

SEQ ID NO: 521 - RNA, 23 nt, synthetic construct
  source 1..23: mol_type = other RNA
  modified_base 1: mod_base = OTHER; note = 2'-O-methyladenosine-3'-phosphorothioate
  modified_base 2: mod_base = OTHER; note = 2'-deoxy-2'-fluoroguanosine-3'-phosphorothioate
  modified_base 3: mod_base = OTHER; note = 2'-O-methylguanosine-3'-phosphate
  modified_base 4: mod_base = OTHER; note = 2'-O-methylguanosine-3'-phosphate
  modified_base 5: mod_base = OTHER; note = 2'-O-methyladenosine-3'-phosphate
  modified_base 6: mod_base = OTHER; note = 2'-deoxy-2'-fluorouridine-3'-phosphate
  modified_base 7: mod_base = OTHER; note = 2'-O-methyladenosine-3'-phosphate
  modified_base 8: mod_base = OTHER; note = 2'-deoxy-2'-fluoroadenosine-3'-phosphate
  modified_base 9: mod_base = OTHER; note = 2'-deoxy-2'-fluoroadenosine-3'-phosphate
  modified_base 10: mod_base = OTHER; note = 2'-O-methylguanosine-3'-phosphate
  modified_base 11: mod_base = OTHER; note = 2'-O-methylcytidine-3'-phosphate
  modified_base 12: mod_base = OTHER; note = 2'-O-methyladenosine-3'-phosphate
  modified_base 13: mod_base = OTHER; note = 2'-O-methylguanosine-3'-phosphate
  modified_base 14: mod_base = OTHER; note = 2'-deoxy-2'-fluorouridine-3'-phosphate
  modified_base 15: mod_base = OTHER; note = 2'-O-methyluridine-3'-phosphate
  modified_base 16: mod_base = OTHER; note = 2'-deoxy-2'-fluorocytidine-3'-phosphate
  modified_base 17: mod_base = OTHER; note = 2'-O-methyluridine-3'-phosphate
  modified_base 18: mod_base = OTHER; note = 2'-O-methylguanosine-3'-phosphate
  modified_base 19: mod_base = OTHER; note = 2'-O-methylguanosine-3'-phosphate
  modified_base 20: mod_base = OTHER; note = 2'-O-methylcytidine-3'-phosphate
  modified_base 21: mod_base = OTHER; note = 2'-O-methylguanosine-3'-phosphorothioate
  modified_base 22: mod_base = OTHER; note = 2'-O-methyluridine-3'-phosphorothioate
  modified_base 23: mod_base = OTHER; note = 2'-O-methyladenosine
agggataaagcagttctggcgta

SEQ ID NO: 522 - RNA, 23 nt, synthetic construct
  source 1..23: mol_type = other RNA
  modified_base 1: mod_base = OTHER; note = 2'-O-methyladenosine-3'-phosphorothioate
  modified_base 2: mod_base = OTHER; note = 2'-deoxy-2'-fluorouridine-3'-phosphorothioate
  modified_base 3: mod_base = OTHER; note = 2'-O-methylguanosine-3'-phosphate
  modified_base 4: mod_base = OTHER; note = 2'-O-methylguanosine-3'-phosphate
  modified_base 5: mod_base = OTHER; note = 2'-O-methylcytidine-3'-phosphate
  modified_base 6: mod_base = OTHER; note = 2'-deoxy-2'-fluoroadenosine-3'-phosphate
  modified_base 7: mod_base = OTHER; note = 2'-O-methyluridine-3'-phosphate
  modified_base 8: mod_base = OTHER; note = 2'-deoxy-2'-fluorouridine-3'-phosphate
  modified_base 9: mod_base = OTHER; note = 2'-deoxy-2'-fluorouridine-3'-phosphate
  modified_base 10: mod_base = OTHER; note = 2'-O-methyluridine-3'-phosphate
  modified_base 11: mod_base = OTHER; note = 2'-O-methylcytidine-3'-phosphate
  modified_base 12: mod_base = OTHER; note = 2'-O-methylcytidine-3'-phosphate
  modified_base 13: mod_base = OTHER; note = 2'-O-methylguanosine-3'-phosphate
  modified_base 14: mod_base = OTHER; note = 2'-deoxy-2'-fluorouridine-3'-phosphate
  modified_base 15: mod_base = OTHER; note = 2'-O-methylguanosine-3'-phosphate
  modified_base 16: mod_base = OTHER; note = 2'-deoxy-2'-fluoroguanosine-3'-phosphate
  modified_base 17: mod_base = OTHER; note = 2'-O-methylguanosine-3'-phosphate
  modified_base 18: mod_base = OTHER; note = 2'-O-methyladenosine-3'-phosphate
  modified_base 19: mod_base = OTHER; note = 2'-O-methyluridine-3'-phosphate
  modified_base 20: mod_base = OTHER; note = 2'-O-methyladenosine-3'-phosphate
  modified_base 21: mod_base = OTHER; note = 2'-O-methyladenosine-3'-phosphorothioate
  modified_base 22: mod_base = OTHER; note = 2'-O-methyladenosine-3'-phosphorothioate
  modified_base 23: mod_base = OTHER; note = 2'-O-methylguanosine
atggcattttccgtgggataaag

SEQ ID NO: 523 - RNA, 23 nt, synthetic construct
  source 1..23: mol_type = other RNA
  modified_base 1: mod_base = OTHER; note = 2'-O-methyladenosine-3'-phosphorothioate
  modified_base 2: mod_base = OTHER; note = 2'-deoxy-2'-fluorouridine-3'-phosphorothioate
  modified_base 3: mod_base = OTHER; note = 2'-O-methyluridine-3'-phosphate
  modified_base 4: mod_base = OTHER; note = 2'-O-methyluridine-3'-phosphate
  modified_base 5: mod_base = OTHER; note = 2'-O-methyladenosine-3'-phosphate
  modified_base 6: mod_base = OTHER; note = 2'-deoxy-2'-fluoroguanosine-3'-phosphate
  modified_base 7: mod_base = OTHER; note = 2'-O-methyladenosine-3'-phosphate
  modified_base 8: mod_base = OTHER; note = 2'-deoxy-2'-fluoroadenosine-3'-phosphate
  modified_base 9: mod_base = OTHER; note = 2'-deoxy-2'-fluoroguanosine-3'-phosphate
  modified_base 10: mod_base = OTHER; note = 2'-O-methyladenosine-3'-phosphate
  modified_base 11: mod_base = OTHER; note = 2'-O-methylguanosine-3'-phosphate
  modified_base 12: mod_base = OTHER; note = 2'-O-methyladenosine-3'-phosphate
  modified_base 13: mod_base = OTHER; note = 2'-O-methyluridine-3'-phosphate
  modified_base 14: mod_base = OTHER; note = 2'-deoxy-2'-fluorouridine-3'-phosphate
  modified_base 15: mod_base = OTHER; note = 2'-O-methylguanosine-3'-phosphate
  modified_base 16: mod_base = OTHER; note = 2'-deoxy-2'-fluoroguanosine-3'-phosphate
  modified_base 17: mod_base = OTHER; note = 2'-O-methylcytidine-3'-phosphate
  modified_base 18: mod_base = OTHER; note = 2'-O-methyladenosine-3'-phosphate
  modified_base 19: mod_base = OTHER; note = 2'-O-methyluridine-3'-phosphate
  modified_base 20: mod_base = OTHER; note = 2'-O-methyluridine-3'-phosphate
  modified_base 21: mod_base = OTHER; note = 2'-O-methyluridine-3'-phosphorothioate
  modified_base 22: mod_base = OTHER; note = 2'-O-methyluridine-3'-phosphorothioate
  modified_base 23: mod_base = OTHER; note = 2'-O-methylcytidine
atttagaagagattggcattttc

SEQ ID NO: 524 - RNA, 23 nt, synthetic construct
  source 1..23: mol_type = other RNA
  modified_base 1: mod_base = OTHER; note = 2'-O-methyladenosine-3'-phosphorothioate
  modified_base 2: mod_base = OTHER; note = 2'-deoxy-2'-fluorocytidine-3'-phosphorothioate
  modified_base 3: mod_base = OTHER; note = 2'-O-methylguanosine-3'-phosphate
  modified_base 4: mod_base = OTHER; note = 2'-O-methyluridine-3'-phosphate
  modified_base 5: mod_base = OTHER; note = 2'-O-methyluridine-3'-phosphate
  modified_base 6: mod_base = OTHER; note = 2'-deoxy-2'-fluorouridine-3'-phosphate
  modified_base 7: mod_base = OTHER; note = 2'-O-methylguanosine-3'-phosphate
  modified_base 8: mod_base = OTHER; note = 2'-deoxy-2'-fluoroadenosine-3'-phosphate
  modified_base 9: mod_base = OTHER; note = 2'-deoxy-2'-fluoroadenosine-3'-phosphate
  modified_base 10: mod_base = OTHER; note = 2'-O-methyladenosine-3'-phosphate
  modified_base 11: mod_base = OTHER; note = 2'-O-methyladenosine-3'-phosphate
  modified_base 12: mod_base = OTHER; note = 2'-O-methyluridine-3'-phosphate
  modified_base 13: mod_base = OTHER; note = 2'-O-methyluridine-3'-phosphate
  modified_base 14: mod_base = OTHER; note = 2'-deoxy-2'-fluoroadenosine-3'-phosphate
  modified_base 15: mod_base = OTHER; note = 2'-O-methylcytidine-3'-phosphate
  modified_base 16: mod_base = OTHER; note = 2'-deoxy-2'-fluorouridine-3'-phosphate
  modified_base 17: mod_base = OTHER; note = 2'-O-methyluridine-3'-phosphate
  modified_base 18: mod_base = OTHER; note = 2'-O-methyluridine-3'-phosphate
  modified_base 19: mod_base = OTHER; note = 2'-O-methylguanosine-3'-phosphate
  modified_base 20: mod_base = OTHER; note = 2'-O-methyladenosine-3'-phosphate
  modified_base 21: mod_base = OTHER; note = 2'-O-methyladenosine-3'-phosphorothioate
  modified_base 22: mod_base = OTHER; note = 2'-O-methylguanosine-3'-phosphorothioate
  modified_base 23: mod_base = OTHER; note = 2'-O-methyluridine
acgtttgaaaattactttgaagt

SEQ ID NO: 525 - RNA, 23 nt, synthetic construct
  source 1..23: mol_type = other RNA
  modified_base 1: mod_base = OTHER; note = 2'-O-methyladenosine-3'-phosphorothioate
  modified_base 2: mod_base = OTHER; note = 2'-deoxy-2'-fluoroadenosine-3'-phosphorothioate
  modified_base 3: mod_base = OTHER; note = 2'-O-methylguanosine-3'-phosphate
  modified_base 4: mod_base = OTHER; note = 2'-O-methyladenosine-3'-phosphate
  modified_base 5: mod_base = OTHER; note = 2'-O-methyladenosine-3'-phosphate
  modified_base 6: mod_base = OTHER; note = 2'-deoxy-2'-fluorouridine-3'-phosphate
  modified_base 7: mod_base = OTHER; note = 2'-O-methyladenosine-3'-phosphate
  modified_base 8: mod_base = OTHER; note = 2'-deoxy-2'-fluorouridine-3'-phosphate
  modified_base 9: mod_base = OTHER; note = 2'-deoxy-2'-fluoroguanosine-3'-phosphate
  modified_base 10: mod_base = OTHER; note = 2'-O-methyluridine-3'-phosphate
  modified_base 11: mod_base = OTHER; note = 2'-O-methyluridine-3'-phosphate
  modified_base 12: mod_base = OTHER; note = 2'-O-methyladenosine-3'-phosphate
  modified_base 13: mod_base = OTHER; note = 2'-O-methyladenosine-3'-phosphate
  modified_base 14: mod_base = OTHER; note = 2'-deoxy-2'-fluorocytidine-3'-phosphate
  modified_base 15: mod_base = OTHER; note = 2'-O-methylcytidine-3'-phosphate
  modified_base 16: mod_base = OTHER; note = 2'-deoxy-2'-fluoroadenosine-3'-phosphate
  modified_base 17: mod_base = OTHER; note = 2'-O-methyluridine-3'-phosphate
  modified_base 18: mod_base = OTHER; note = 2'-O-methyladenosine-3'-phosphate
  modified_base 19: mod_base = OTHER; note = 2'-O-methylcytidine-3'-phosphate
  modified_base 20: mod_base = OTHER; note = 2'-O-methyladenosine-3'-phosphate
  modified_base 21: mod_base = OTHER; note = 2'-O-methyladenosine-3'-phosphorothioate
  modified_base 22: mod_base = OTHER; note = 2'-O-methyladenosine-3'-phosphorothioate
  modified_base 23: mod_base = OTHER; note = 2'-O-methylguanosine
aagaatatgttaaccatacaaag

SEQ ID NO: 526 - RNA, 23 nt, synthetic construct
  source 1..23: mol_type = other RNA
  modified_base 1: mod_base = OTHER; note = 2'-O-methyladenosine-3'-phosphorothioate
  modified_base 2: mod_base = OTHER; note = 2'-deoxy-2'-fluoroguanosine-3'-phosphorothioate
  modified_base 3: mod_base = OTHER; note = 2'-O-methyluridine-3'-phosphate
  modified_base 4: mod_base = OTHER; note = 2'-O-methylguanosine-3'-phosphate
  modified_base 5: mod_base = OTHER; note = 2'-O-methyluridine-3'-phosphate
  modified_base 6: mod_base = OTHER; note = 2'-deoxy-2'-fluoroguanosine-3'-phosphate
  modified_base 7: mod_base = OTHER; note = 2'-O-methylguanosine-3'-phosphate
  modified_base 8: mod_base = OTHER; note = 2'-deoxy-2'-fluorouridine-3'-phosphate
  modified_base 9: mod_base = OTHER; note = 2'-deoxy-2'-fluorocytidine-3'-phosphate
  modified_base 10: mod_base = OTHER; note = 2'-O-methyladenosine-3'-phosphate
  modified_base 11: mod_base = OTHER; note = 2'-O-methyluridine-3'-phosphate
  modified_base 12: mod_base = OTHER; note = 2'-O-methylguanosine-3'-phosphate
  modified_base 13: mod_base = OTHER; note = 2'-O-methylguanosine-3'-phosphate
  modified_base 14: mod_base = OTHER; note = 2'-deoxy-2'-fluoroadenosine-3'-phosphate
  modified_base 15: mod_base = OTHER; note = 2'-O-methylcytidine-3'-phosphate
  modified_base 16: mod_base = OTHER; note = 2'-deoxy-2'-fluorocytidine-3'-phosphate
  modified_base 17: mod_base = OTHER; note = 2'-O-methyluridine-3'-phosphate
  modified_base 18: mod_base = OTHER; note = 2'-O-methylguanosine-3'-phosphate
  modified_base 19: mod_base = OTHER; note = 2'-O-methylguanosine-3'-phosphate
  modified_base 20: mod_base = OTHER; note = 2'-O-methylcytidine-3'-phosphate
  modified_base 21: mod_base = OTHER; note = 2'-O-methyladenosine-3'-phosphorothioate
  modified_base 22: mod_base = OTHER; note = 2'-O-methylguanosine-3'-phosphorothioate
  modified_base 23: mod_base = OTHER; note = 2'-O-methyladenosine
agtgtggtcatggacctggcaga

SEQ ID NO: 527 - RNA, 23 nt, synthetic construct
  source 1..23: mol_type = other RNA
  modified_base 1: mod_base = OTHER; note = 2'-O-methyladenosine-3'-phosphorothioate
  modified_base 2: mod_base = OTHER; note = 2'-deoxy-2'-fluoroguanosine-3'-phosphorothioate
  modified_base 3: mod_base = OTHER; note = 2'-O-methylcytidine-3'-phosphate
  modified_base 4: mod_base = OTHER; note = 2'-O-methyladenosine-3'-phosphate
  modified_base 5: mod_base = OTHER; note = 2'-O-methyluridine-3'-phosphate
  modified_base 6: mod_base = OTHER; note = 2'-deoxy-2'-fluoroguanosine-3'-phosphate
  modified_base 7: mod_base = OTHER; note = 2'-O-methylguanosine-3'-phosphate
  modified_base 8: mod_base = OTHER; note = 2'-deoxy-2'-fluorouridine-3'-phosphate
  modified_base 9: mod_base = OTHER; note = 2'-deoxy-2'-fluoroadenosine-3'-phosphate
  modified_base 10: mod_base = OTHER; note = 2'-O-methylcytidine-3'-phosphate
  modified_base 11: mod_base = OTHER; note = 2'-O-methyladenosine-3'-phosphate
  modified_base 12: mod_base = OTHER; note = 2'-O-methylguanosine-3'-phosphate
  modified_base 13: mod_base = OTHER; note = 2'-O-methyladenosine-3'-phosphate
  modified_base 14: mod_base = OTHER; note = 2'-deoxy-2'-fluorocytidine-3'-phosphate
  modified_base 15: mod_base = OTHER; note = 2'-O-methylguanosine-3'-phosphate
  modified_base 16: mod_base = OTHER; note = 2'-deoxy-2'-fluorouridine-3'-phosphate
  modified_base 17: mod_base = OTHER; note = 2'-O-methylguanosine-3'-phosphate
  modified_base 18: mod_base = OTHER; note = 2'-O-methyluridine-3'-phosphate
  modified_base 19: mod_base = OTHER; note = 2'-O-methylguanosine-3'-phosphate
  modified_base 20: mod_base = OTHER; note = 2'-O-methylguanosine-3'-phosphate
  modified_base 21: mod_base = OTHER; note = 2'-O-methyluridine-3'-phosphorothioate
  modified_base 22: mod_base = OTHER; note = 2'-O-methylcytidine-3'-phosphorothioate
  modified_base 23: mod_base = OTHER; note = 2'-O-methyladenosine
agcatggtacagacgtgtggtca

SEQ ID NO: 528 - RNA, 23 nt, synthetic construct
  source 1..23: mol_type = other RNA
  modified_base 1: mod_base = OTHER; note = 2'-O-methyladenosine-3'-phosphorothioate
  modified_base 2: mod_base = OTHER; note = 2'-deoxy-2'-fluoroadenosine-3'-phosphorothioate
  modified_base 3: mod_base = OTHER; note = 2'-O-methyluridine-3'-phosphate
  modified_base 4: mod_base = OTHER; note = 2'-O-methyladenosine-3'-phosphate
  modified_base 5: mod_base = OTHER; note = 2'-O-methyladenosine-3'-phosphate
  modified_base 6: mod_base = OTHER; note = 2'-deoxy-2'-fluoroguanosine-3'-phosphate
  modified_base 7: mod_base = OTHER; note = 2'-O-methyladenosine-3'-phosphate
  modified_base 8: mod_base = OTHER; note = 2'-deoxy-2'-fluoroguanosine-3'-phosphate
  modified_base 9: mod_base = OTHER; note = 2'-deoxy-2'-fluorouridine-3'-phosphate
  modified_base 10: mod_base = OTHER; note = 2'-O-methyluridine-3'-phosphate
  modified_base 11: mod_base = OTHER; note = 2'-O-methyladenosine-3'-phosphate
  modified_base 12: mod_base = OTHER; note = 2'-O-methyladenosine-3'-phosphate
  modified_base 13: mod_base = OTHER; note = 2'-O-methyladenosine-3'-phosphate
  modified_base 14: mod_base = OTHER; note = 2'-deoxy-2'-fluorouridine-3'-phosphate
  modified_base 15: mod_base = OTHER; note = 2'-O-methyluridine-3'-phosphate
  modified_base 16: mod_base = OTHER; note = 2'-deoxy-2'-fluoroguanosine-3'-phosphate
  modified_base 17: mod_base = OTHER; note = 2'-O-methylcytidine-3'-phosphate
  modified_base 18: mod_base = OTHER; note = 2'-O-methyladenosine-3'-phosphate
  modified_base 19: mod_base = OTHER; note = 2'-O-methyluridine-3'-phosphate
  modified_base 20: mod_base = OTHER; note = 2'-O-methylguanosine-3'-phosphate
  modified_base 21: mod_base = OTHER; note = 2'-O-methylguanosine-3'-phosphorothioate
  modified_base 22: mod_base = OTHER; note = 2'-O-methyluridine-3'-phosphorothioate
  modified_base 23: mod_base = OTHER; note = 2'-O-methyladenosine
aataagagttaaattgcatggta

SEQ ID NO: 529 - RNA, 23 nt, synthetic construct
  source 1..23: mol_type = other RNA
  modified_base 1: mod_base = OTHER; note = 2'-O-methyladenosine-3'-phosphorothioate
  modified_base 2: mod_base = OTHER; note = 2'-deoxy-2'-fluoroadenosine-3'-phosphorothioate
  modified_base 3: mod_base = OTHER; note = 2'-O-methylcytidine-3'-phosphate
  modified_base 4: mod_base = OTHER; note = 2'-O-methyladenosine-3'-phosphate
  modified_base 5: mod_base = OTHER; note = 2'-O-methylcytidine-3'-phosphate
  modified_base 6: mod_base = OTHER; note = 2'-deoxy-2'-fluorocytidine-3'-phosphate
  modified_base 7: mod_base = OTHER; note = 2'-O-methyluridine-3'-phosphate
  modified_base 8: mod_base = OTHER; note = 2'-deoxy-2'-fluoroadenosine-3'-phosphate
  modified_base 9: mod_base = OTHER; note = 2'-deoxy-2'-fluoroadenosine-3'-phosphate
  modified_base 10: mod_base = OTHER; note = 2'-O-methylguanosine-3'-phosphate
  modified_base 11: mod_base = OTHER; note = 2'-O-methylcytidine-3'-phosphate
  modified_base 12: mod_base = OTHER; note = 2'-O-methyladenosine-3'-phosphate
  modified_base 13: mod_base = OTHER; note = 2'-O-methyladenosine-3'-phosphate
  modified_base 14: mod_base = OTHER; note = 2'-deoxy-2'-fluoroadenosine-3'-phosphate
  modified_base 15: mod_base = OTHER; note = 2'-O-methyluridine-3'-phosphate
  modified_base 16: mod_base = OTHER; note = 2'-deoxy-2'-fluoroadenosine-3'-phosphate
  modified_base 17: mod_base = OTHER; note = 2'-O-methyladenosine-3'-phosphate
  modified_base 18: mod_base = OTHER; note = 2'-O-methylcytidine-3'-phosphate
  modified_base 19: mod_base = OTHER; note = 2'-O-methylcytidine-3'-phosphate
  modified_base 20: mod_base = OTHER; note = 2'-O-methyladenosine-3'-phosphate
  modified_base 21: mod_base = OTHER; note = 2'-O-methyladenosine-3'-phosphorothioate
  modified_base 22: mod_base = OTHER; note = 2'-O-methyladenosine-3'-phosphorothioate
  modified_base 23: mod_base = OTHER; note = 2'-O-methylcytidine
aacacctaagcaaataaccaaac

SEQ ID NO: 530 - RNA, 23 nt, synthetic construct
  source 1..23: mol_type = other RNA
  modified_base 1: mod_base = OTHER; note = 2'-O-methyladenosine-3'-phosphorothioate
  modified_base 2: mod_base = OTHER; note = 2'-deoxy-2'-fluoroadenosine-3'-phosphorothioate
  modified_base 3: mod_base = OTHER; note = 2'-O-methyluridine-3'-phosphate
  modified_base 4: mod_base = OTHER; note = 2'-O-methyluridine-3'-phosphate
  modified_base 5: mod_base = OTHER; note = 2'-O-methyluridine-3'-phosphate
  modified_base 6: mod_base = OTHER; note = 2'-deoxy-2'-fluoroguanosine-3'-phosphate
  modified_base 7: mod_base = OTHER; note = 2'-O-methylcytidine-3'-phosphate
  modified_base 8: mod_base = OTHER; note = 2'-deoxy-2'-fluorouridine-3'-phosphate
  modified_base 9: mod_base = OTHER; note = 2'-deoxy-2'-fluoroguanosine-3'-phosphate
  modified_base 10: mod_base = OTHER; note = 2'-O-methyladenosine-3'-phosphate
  modified_base 11: mod_base = OTHER; note = 2'-O-methyladenosine-3'-phosphate
  modified_base 12: mod_base = OTHER; note = 2'-O-methyluridine-3'-phosphate
  modified_base 13: mod_base = OTHER; note = 2'-O-methylguanosine-3'-phosphate
  modified_base 14: mod_base = OTHER; note = 2'-deoxy-2'-fluoroadenosine-3'-phosphate
  modified_base 15: mod_base = OTHER; note = 2'-O-methyladenosine-3'-phosphate
  modified_base 16: mod_base = OTHER; note = 2'-deoxy-2'-fluorouridine-3'-phosphate
  modified_base 17: mod_base = OTHER; note = 2'-O-methylguanosine-3'-phosphate
  modified_base 18: mod_base = OTHER; note = 2'-O-methyluridine-3'-phosphate
  modified_base 19: mod_base = OTHER; note = 2'-O-methyladenosine-3'-phosphate
  modified_base 20: mod_base = OTHER; note = 2'-O-methyluridine-3'-phosphate
  modified_base 21: mod_base = OTHER; note = 2'-O-methylguanosine-3'-phosphorothioate
  modified_base 22: mod_base = OTHER; note = 2'-O-methylcytidine-3'-phosphorothioate
  modified_base 23: mod_base = OTHER; note = 2'-O-methyladenosine
aatttgctgaatgaatgtatgca

SEQ ID NO: 531 - RNA, 23 nt, synthetic construct
  source 1..23: mol_type = other RNA
  modified_base 1: mod_base = OTHER; note = 2'-O-methyladenosine-3'-phosphorothioate
  modified_base 2: mod_base = OTHER; note = 2'-deoxy-2'-fluoroadenosine-3'-phosphorothioate
  modified_base 3: mod_base = OTHER; note = 2'-O-methyladenosine-3'-phosphate
  modified_base 4: mod_base = OTHER; note = 2'-O-methylcytidine-3'-phosphate
  modified_base 5: mod_base = OTHER; note = 2'-O-methyluridine-3'-phosphate
  modified_base 6: mod_base = OTHER; note = 2'-deoxy-2'-fluoroguanosine-3'-phosphate
  modified_base 7: mod_base = OTHER; note = 2'-O-methylcytidine-3'-phosphate
  modified_base 8: mod_base = OTHER; note = 2'-deoxy-2'-fluorouridine-3'-phosphate
  modified_base 9: mod_base = OTHER; note = 2'-deoxy-2'-fluoroguanosine-3'-phosphate
  modified_base 10: mod_base = OTHER; note = 2'-O-methyluridine-3'-phosphate
  modified_base 11: mod_base = OTHER; note = 2'-O-methylguanosine-3'-phosphate
  modified_base 12: mod_base = OTHER; note = 2'-O-methylcytidine-3'-phosphate
  modified_base 13: mod_base = OTHER; note = 2'-O-methyladenosine-3'-phosphate
  modified_base 14: mod_base = OTHER; note = 2'-deoxy-2'-fluorocytidine-3'-phosphate
  modified_base 15: mod_base = OTHER; note = 2'-O-methylguanosine-3'-phosphate
  modified_base 16: mod_base = OTHER; note = 2'-deoxy-2'-fluorouridine-3'-phosphate
  modified_base 17: mod_base = OTHER; note = 2'-O-methylguanosine-3'-phosphate
  modified_base 18: mod_base = OTHER; note = 2'-O-methylguanosine-3'-phosphate
  modified_base 19: mod_base = OTHER; note = 2'-O-methylcytidine-3'-phosphate
  modified_base 20: mod_base = OTHER; note = 2'-O-methyluridine-3'-phosphate
  modified_base 21: mod_base = OTHER; note = 2'-O-methylguanosine-3'-phosphorothioate
  modified_base 22: mod_base = OTHER; note = 2'-O-methylguanosine-3'-phosphorothioate
  modified_base 23: mod_base = OTHER; note = 2'-O-methyluridine
aaactgctgtgcacgtggctggt

SEQ ID NO: 532 - RNA, 23 nt, synthetic construct
  source 1..23: mol_type = other RNA
  modified_base 1: mod_base = OTHER; note = 2'-O-methyladenosine-3'-phosphorothioate
  modified_base 2: mod_base = OTHER; note = 2'-deoxy-2'-fluoroadenosine-3'-phosphorothioate
  modified_base 3: mod_base = OTHER; note = 2'-O-methyladenosine-3'-phosphate
  modified_base 4: mod_base = OTHER; note = 2'-O-methylguanosine-3'-phosphate
  modified_base 5: mod_base = OTHER; note = 2'-O-methyladenosine-3'-phosphate
  modified_base 6: mod_base = OTHER; note = 2'-deoxy-2'-fluorocytidine-3'-phosphate
  modified_base 7: mod_base = OTHER; note = 2'-O-methyluridine-3'-phosphate
  modified_base 8: mod_base = OTHER; note = 2'-deoxy-2'-fluoroadenosine-3'-phosphate
  modified_base 9: mod_base = OTHER; note = 2'-deoxy-2'-fluoroguanosine-3'-phosphate
  modified_base 10: mod_base = OTHER; note = 2'-O-methyluridine-3'-phosphate
  modified_base 11: mod_base = OTHER; note = 2'-O-methyladenosine-3'-phosphate
  modified_base 12: mod_base = OTHER; note = 2'-O-methyladenosine-3'-phosphate
  modified_base 13: mod_base = OTHER; note = 2'-O-methyladenosine-3'-phosphate
  modified_base 14: mod_base = OTHER; note = 2'-deoxy-2'-fluoroadenosine-3'-phosphate
  modified_base 15: mod_base = OTHER; note = 2'-O-methylguanosine-3'-phosphate
  modified_base 16: mod_base = OTHER; note = 2'-deoxy-2'-fluorocytidine-3'-phosphate
  modified_base 17: mod_base = OTHER; note = 2'-O-methyladenosine-3'-phosphate
  modified_base 18: mod_base = OTHER; note = 2'-O-methyladenosine-3'-phosphate
  modified_base 19: mod_base = OTHER; note = 2'-O-methylcytidine-3'-phosphate
  modified_base 20: mod_base = OTHER; note = 2'-O-methyluridine-3'-phosphate
  modified_base 21: mod_base = OTHER; note = 2'-O-methylguanosine-3'-phosphorothioate
  modified_base 22: mod_base = OTHER; note = 2'-O-methylcytidine-3'-phosphorothioate
  modified_base 23: mod_base = OTHER; note = 2'-O-methyluridine
aaagactagtaaaagcaactgct

SEQ ID NO: 533 - RNA, 23 nt, synthetic construct
  source 1..23: mol_type = other RNA
  modified_base 1: mod_base = OTHER; note = 2'-O-methyladenosine-3'-phosphorothioate
  modified_base 2: mod_base = OTHER; note = 2'-deoxy-2'-fluoroadenosine-3'-phosphorothioate
  modified_base 3: mod_base = OTHER; note = 2'-O-methyladenosine-3'-phosphate
  modified_base 4: mod_base = OTHER; note = 2'-O-methyluridine-3'-phosphate
  modified_base 5: mod_base = OTHER; note = 2'-O-methylcytidine-3'-phosphate
  modified_base 6: mod_base = OTHER; note = 2'-deoxy-2'-fluoroguanosine-3'-phosphate
  modified_base 7: mod_base = OTHER; note = 2'-O-methyluridine-3'-phosphate
  modified_base 8: mod_base = OTHER; note = 2'-deoxy-2'-fluoroadenosine-3'-phosphate
  modified_base 9: mod_base = OTHER; note = 2'-deoxy-2'-fluoroguanosine-3'-phosphate
  modified_base 10: mod_base = OTHER; note = 2'-O-methyladenosine-3'-phosphate
  modified_base 11: mod_base = OTHER; note = 2'-O-methylguanosine-3'-phosphate
  modified_base 12: mod_base = OTHER; note = 2'-O-methylcytidine-3'-phosphate
  modified_base 13: mod_base = OTHER; note = 2'-O-methyluridine-3'-phosphate
  modified_base 14: mod_base = OTHER; note = 2'-deoxy-2'-fluoroadenosine-3'-phosphate
  modified_base 15: mod_base = OTHER; note = 2'-O-methyladenosine-3'-phosphate
  modified_base 16: mod_base = OTHER; note = 2'-deoxy-2'-fluoroguanosine-3'-phosphate
  modified_base 17: mod_base = OTHER; note = 2'-O-methyladenosine-3'-phosphate
  modified_base 18: mod_base = OTHER; note = 2'-O-methylcytidine-3'-phosphate
  modified_base 19: mod_base = OTHER; note = 2'-O-methyluridine-3'-phosphate
  modified_base 20: mod_base = OTHER; note = 2'-O-methyladenosine-3'-phosphate
  modified_base 21: mod_base = OTHER; note = 2'-O-methylguanosine-3'-phosphorothioate
  modified_base 22: mod_base = OTHER; note = 2'-O-methyluridine-3'-phosphorothioate
  modified_base 23: mod_base = OTHER; note = 2'-O-methyladenosine
aaatcgtagagctaagactagta

SEQ ID NO: 534 - RNA, 23 nt, synthetic construct
  source 1..23: mol_type = other RNA
  modified_base 1: mod_base = OTHER; note = 2'-O-methyladenosine-3'-phosphorothioate
  modified_base 2: mod_base = OTHER; note = 2'-deoxy-2'-fluoroguanosine-3'-phosphorothioate
  modified_base 3: mod_base = OTHER; note = 2'-O-methyladenosine-3'-phosphate
  modified_base 4: mod_base = OTHER; note = 2'-O-methylcytidine-3'-phosphate
  modified_base 5: mod_base = OTHER; note = 2'-O-methyladenosine-3'-phosphate
  modified_base 6: mod_base = OTHER; note = 2'-deoxy-2'-fluorocytidine-3'-phosphate
  modified_base 7: mod_base = OTHER; note = 2'-O-methyladenosine-3'-phosphate
  modified_base 8: mod_base = OTHER; note = 2'-deoxy-2'-fluorouridine-3'-phosphate
  modified_base 9: mod_base = OTHER; note = 2'-deoxy-2'-fluoroguanosine-3'-phosphate
  modified_base 10: mod_base = OTHER; note = 2'-O-methylguanosine-3'-phosphate
  modified_base 11: mod_base = OTHER; note = 2'-O-methyladenosine-3'-phosphate
  modified_base 12: mod_base = OTHER; note = 2'-O-methyluridine-3'-phosphate
  modified_base 13: mod_base = OTHER; note = 2'-O-methyluridine-3'-phosphate
  modified_base 14: mod_base = OTHER; note = 2'-deoxy-2'-fluorouridine-3'-phosphate
  modified_base 15: mod_base = OTHER; note = 2'-O-methyladenosine-3'-phosphate
  modified_base 16: mod_base = OTHER; note = 2'-deoxy-2'-fluoroadenosine-3'-phosphate
  modified_base 17: mod_base = OTHER; note = 2'-O-methyladenosine-3'-phosphate
  modified_base 18: mod_base = OTHER; note = 2'-O-methyluridine-3'-phosphate
  modified_base 19: mod_base = OTHER; note = 2'-O-methylcytidine-3'-phosphate
  modified_base 20: mod_base = OTHER; note = 2'-O-methylguanosine-3'-phosphate
  modified_base 21: mod_base = OTHER; note = 2'-O-methyluridine-3'-phosphorothioate
  modified_base 22: mod_base = OTHER; note = 2'-O-methyladenosine-3'-phosphorothioate
  modified_base 23: mod_base = OTHER; note = 2'-O-methylguanosine
agacacatggatttaaatcgtag

SEQ ID NO: 535 - RNA, 23 nt, synthetic construct
  source 1..23: mol_type = other RNA
  modified_base 1: mod_base = OTHER; note = 2'-O-methyladenosine-3'-phosphorothioate
  modified_base 2: mod_base = OTHER; note = 2'-deoxy-2'-fluorouridine-3'-phosphorothioate
  modified_base 3: mod_base = OTHER; note = 2'-O-methylcytidine-3'-phosphate
  modified_base 4: mod_base = OTHER; note = 2'-O-methylcytidine-3'-phosphate
  modified_base 5: mod_base = OTHER; note = 2'-O-methyluridine-3'-phosphate
  modified_base 6: mod_base = OTHER; note = 2'-deoxy-2'-fluorocytidine-3'-phosphate
  modified_base 7: mod_base = OTHER; note = 2'-O-methyluridine-3'-phosphate
  modified_base 8: mod_base = OTHER; note = 2'-deoxy-2'-fluoroguanosine-3'-phosphate
  modified_base 9: mod_base = OTHER; note = 2'-deoxy-2'-fluoroguanosine-3'-phosphate
  modified_base 10: mod_base = OTHER; note = 2'-O-methyluridine-3'-phosphate
  modified_base 11: mod_base = OTHER; note = 2'-O-methyladenosine-3'-phosphate
  modified_base 12: mod_base = OTHER; note = 2'-O-methyladenosine-3'-phosphate
  modified_base 13: mod_base = OTHER; note = 2'-O-methyladenosine-3'-phosphate
  modified_base 14: mod_base = OTHER; note = 2'-deoxy-2'-fluorocytidine-3'-phosphate
  modified_base 15: mod_base = OTHER; note = 2'-O-methyluridine-3'-phosphate
  modified_base 16: mod_base = OTHER; note = 2'-deoxy-2'-fluoroadenosine-3'-phosphate
  modified_base 17: mod_base = OTHER; note = 2'-O-methylguanosine-3'-phosphate
  modified_base 18: mod_base = OTHER; note = 2'-O-methyluridine-3'-phosphate
  modified_base 19: mod_base = OTHER; note = 2'-O-methyladenosine-3'-phosphate
  modified_base 20: mod_base = OTHER; note = 2'-O-methylguanosine-3'-phosphate
  modified_base 21: mod_base = OTHER; note = 2'-O-methyluridine-3'-phosphorothioate
  modified_base 22: mod_base = OTHER; note = 2'-O-methyluridine-3'-phosphorothioate
  modified_base 23: mod_base = OTHER; note = 2'-O-methyluridine
atcctctggtaaactagtagttt

SEQ ID NO: 536 - RNA, 23 nt, synthetic construct
  source 1..23: mol_type = other RNA
  modified_base 1: mod_base = OTHER; note = 2'-O-methyladenosine-3'-phosphorothioate
  modified_base 2: mod_base = OTHER; note = 2'-deoxy-2'-fluoroadenosine-3'-phosphorothioate
  modified_base 3: mod_base = OTHER; note = 2'-O-methyladenosine-3'-phosphate
  modified_base 4: mod_base = OTHER; note = 2'-O-methylcytidine-3'-phosphate
  modified_base 5: mod_base = OTHER; note = 2'-O-methyluridine-3'-phosphate
  modified_base 6: mod_base = OTHER; note = 2'-deoxy-2'-fluorocytidine-3'-phosphate
  modified_base 7: mod_base = OTHER; note = 2'-O-methylcytidine-3'-phosphate
  modified_base 8: mod_base = OTHER; note = 2'-deoxy-2'-fluorouridine-3'-phosphate
  modified_base 9: mod_base = OTHER; note = 2'-deoxy-2'-fluorocytidine-3'-phosphate
  modified_base 10: mod_base = OTHER; note = 2'-O-methyluridine-3'-phosphate
  modified_base 11: mod_base = OTHER; note = 2'-O-methyluridine-3'-phosphate
  modified_base 12: mod_base = OTHER; note = 2'-O-methyluridine-3'-phosphate
  modified_base 13: mod_base = OTHER; note = 2'-O-methyladenosine-3'-phosphate
  modified_base 14: mod_base = OTHER; note = 2'-deoxy-2'-fluorouridine-3'-phosphate
  modified_base 15: mod_base = OTHER; note = 2'-O-methylcytidine-3'-phosphate
  modified_base 16: mod_base = OTHER; note = 2'-deoxy-2'-fluorouridine-3'-phosphate
  modified_base 17: mod_base = OTHER; note = 2'-O-methylcytidine-3'-phosphate
  modified_base 18: mod_base = OTHER; note = 2'-O-methylcytidine-3'-phosphate
  modified_base 19: mod_base = OTHER; note = 2'-O-methylcytidine-3'-phosphate
  modified_base 20: mod_base = OTHER; note = 2'-O-methyluridine-3'-phosphate
  modified_base 21: mod_base = OTHER; note = 2'-O-methyluridine-3'-phosphorothioate
  modified_base 22: mod_base = OTHER; note = 2'-O-methylcytidine-3'-phosphorothioate
  modified_base 23: mod_base = OTHER; note = 2'-O-methyladenosine
aaactcctctttatctcccttca

SEQ ID NO: 537 - RNA, 23 nt, synthetic construct
  source 1..23: mol_type = other RNA
  modified_base 1: mod_base = OTHER; note = 2'-O-methyladenosine-3'-phosphorothioate
  modified_base 2: mod_base = OTHER; note = 2'-deoxy-2'-fluorouridine-3'-phosphorothioate
  modified_base 3: mod_base = OTHER; note = 2'-O-methyluridine-3'-phosphate
  modified_base 4: mod_base = OTHER; note = 2'-O-methylguanosine-3'-phosphate
  modified_base 5: mod_base = OTHER; note = 2'-O-methyluridine-3'-phosphate
  modified_base 6: mod_base = OTHER; note = 2'-deoxy-2'-fluoroadenosine-3'-phosphate
  modified_base 7: mod_base = OTHER; note = 2'-O-methylcytidine-3'-phosphate
  modified_base 8: mod_base = OTHER; note = 2'-deoxy-2'-fluorocytidine-3'-phosphate
  modified_base 9: mod_base = OTHER; note = 2'-deoxy-2'-fluorocytidine-3'-phosphate
  modified_base 10: mod_base = OTHER; note = 2'-O-methyladenosine-3'-phosphate
  modified_base 11: mod_base = OTHER; note = 2'-O-methyluridine-3'-phosphate
  modified_base 12: mod_base = OTHER; note = 2'-O-methyluridine-3'-phosphate
  modified_base 13: mod_base = OTHER; note = 2'-O-methyladenosine-3'-phosphate
  modified_base 14: mod_base = OTHER; note = 2'-deoxy-2'-fluoroadenosine-3'-phosphate
  modified_base 15: mod_base = OTHER; note = 2'-O-methylcytidine-3'-phosphate
  modified_base 16: mod_base = OTHER; note = 2'-deoxy-2'-fluorocytidine-3'-phosphate
  modified_base 17: mod_base = OTHER; note = 2'-O-methyladenosine-3'-phosphate
  modified_base 18: mod_base = OTHER; note = 2'-O-methyladenosine-3'-phosphate
  modified_base 19: mod_base = OTHER; note = 2'-O-methylcytidine-3'-phosphate
  modified_base 20: mod_base = OTHER; note = 2'-O-methyluridine-3'-phosphate
  modified_base 21: mod_base = OTHER; note = 2'-O-methylcytidine-3'-phosphorothioate
  modified_base 22: mod_base = OTHER; note = 2'-O-methylcytidine-3'-phosphorothioate
  modified_base 23: mod_base = OTHER; note = 2'-O-methyluridine
attgtacccattaaccaactcct

SEQ ID NO: 538 - RNA, 23 nt, synthetic construct
  source 1..23: mol_type = other RNA
  modified_base 1: mod_base = OTHER; note = 2'-O-methyladenosine-3'-phosphorothioate
  modified_base 2: mod_base = OTHER; note = 2'-deoxy-2'-fluorouridine-3'-phosphorothioate
  modified_base 3: mod_base = OTHER; note = 2'-O-methyluridine-3'-phosphate
  modified_base 4: mod_base = OTHER; note = 2'-O-methylcytidine-3'-phosphate
  modified_base 5: mod_base = OTHER; note = 2'-O-methylcytidine-3'-phosphate
  modified_base 6: mod_base = OTHER; note = 2'-deoxy-2'-fluorouridine-3'-phosphate
  modified_base 7: mod_base = OTHER; note = 2'-O-methyluridine-3'-phosphate
  modified_base 8: mod_base = OTHER; note = 2'-deoxy-2'-fluorouridine-3'-phosphate
  modified_base 9: mod_base = OTHER; note = 2'-deoxy-2'-fluorocytidine-3'-phosphate
  modified_base 10: mod_base = OTHER; note = 2'-O-methyladenosine-3'-phosphate
  modified_base 11: mod_base = OTHER; note = 2'-O-methyluridine-3'-phosphate
  modified_base 12: mod_base = OTHER; note = 2'-O-methylcytidine-3'-phosphate
  modified_base 13: mod_base = OTHER; note = 2'-O-methyluridine-3'-phosphate
  modified_base 14: mod_base = OTHER; note = 2'-deoxy-2'-fluoroadenosine-3'-phosphate
  modified_base 15: mod_base = OTHER; note = 2'-O-methyladenosine-3'-phosphate
  modified_base 16: mod_base = OTHER; note = 2'-deoxy-2'-fluorocytidine-3'-phosphate
  modified_base 17: mod_base = OTHER; note = 2'-O-methyluridine-3'-phosphate
  modified_base 18: mod_base = OTHER; note = 2'-O-methylguanosine-3'-phosphate
  modified_base 19: mod_base = OTHER; note = 2'-O-methylguanosine-3'-phosphate
  modified_base 20: mod_base = OTHER; note = 2'-O-methyladenosine-3'-phosphate
  modified_base 21: mod_base = OTHER; note = 2'-O-methyluridine-3'-phosphorothioate
  modified_base 22: mod_base = OTHER; note = 2'-O-methyluridine-3'-phosphorothioate
  modified_base 23: mod_base = OTHER; note = 2'-O-methyluridine
attcctttcatctaactggattt

SEQ ID NO: 539 - RNA, 23 nt, synthetic construct
  source 1..23: mol_type = other RNA
  modified_base 1: mod_base = OTHER; note = 2'-O-methyladenosine-3'-phosphorothioate
  modified_base 2: mod_base = OTHER; note = 2'-deoxy-2'-fluorocytidine-3'-phosphorothioate
  modified_base 3: mod_base = OTHER; note = 2'-O-methyladenosine-3'-phosphate
  modified_base 4: mod_base = OTHER; note = 2'-O-methylcytidine-3'-phosphate
  modified_base 5: mod_base = OTHER; note = 2'-O-methyluridine-3'-phosphate
  modified_base 6: mod_base = OTHER; note = 2'-deoxy-2'-fluoroadenosine-3'-phosphate
  modified_base 7: mod_base = OTHER; note = 2'-O-methyluridine-3'-phosphate
  modified_base 8: mod_base = OTHER; note = 2'-deoxy-2'-fluorocytidine-3'-phosphate
  modified_base 9: mod_base = OTHER; note = 2'-deoxy-2'-fluorouridine-3'-phosphate
  modified_base 10: mod_base = OTHER; note = 2'-O-methyladenosine-3'-phosphate
  modified_base 11: mod_base = OTHER; note = 2'-O-methyluridine-3'-phosphate
  modified_base 12: mod_base = OTHER; note = 2'-O-methyladenosine-3'-phosphate
  modified_base 13: mod_base = OTHER; note = 2'-O-methyluridine-3'-phosphate
  modified_base 14: mod_base = OTHER; note = 2'-deoxy-2'-fluorouridine-3'-phosphate
  modified_base 15: mod_base = OTHER; note = 2'-O-methyladenosine-3'-phosphate
  modified_base 16: mod_base = OTHER; note = 2'-deoxy-2'-fluorouridine-3'-phosphate
  modified_base 17: mod_base = OTHER; note = 2'-O-methyluridine-3'-phosphate
  modified_base 18: mod_base = OTHER; note = 2'-O-methylcytidine-3'-phosphate
  modified_base 19: mod_base = OTHER; note = 2'-O-methylcytidine-3'-phosphate
  modified_base 20: mod_base = OTHER; note = 2'-O-methyluridine-3'-phosphate
  modified_base 21: mod_base = OTHER; note = 2'-O-methyluridine-3'-phosphorothioate
  modified_base 22: mod_base = OTHER; note = 2'-O-methyluridine-3'-phosphorothioate
  modified_base 23: mod_base = OTHER; note = 2'-O-methylcytidine
acactatctatattattcctttc

SEQ ID NO: 540 - RNA, 23 nt, synthetic construct
  source 1..23: mol_type = other RNA
  modified_base 1: mod_base = OTHER; note = 2'-O-methyladenosine-3'-phosphorothioate
  modified_base 2: mod_base = OTHER; note = 2'-deoxy-2'-fluorouridine-3'-phosphorothioate
  modified_base 3: mod_base = OTHER; note = 2'-O-methyluridine-3'-phosphate
  modified_base 4: mod_base = OTHER; note = 2'-O-methylcytidine-3'-phosphate
  modified_base 5: mod_base = OTHER; note = 2'-O-methyluridine-3'-phosphate
  modified_base 6: mod_base = OTHER; note = 2'-deoxy-2'-fluoroguanosine-3'-phosphate
  modified_base 7: mod_base = OTHER; note = 2'-O-methylcytidine-3'-phosphate
  modified_base 8: mod_base = OTHER; note = 2'-deoxy-2'-fluorouridine-3'-phosphate
  modified_base 9: mod_base = OTHER; note = 2'-deoxy-2'-fluoroadenosine-3'-phosphate
  modified_base 10: mod_base = OTHER; note = 2'-O-methylcytidine-3'-phosphate
  modified_base 11: mod_base = OTHER; note = 2'-O-methyluridine-3'-phosphate
  modified_base 12: mod_base = OTHER; note = 2'-O-methylguanosine-3'-phosphate
  modified_base 13: mod_base = OTHER; note = 2'-O-methyladenosine-3'-phosphate
  modified_base 14: mod_base = OTHER; note = 2'-deoxy-2'-fluoroadenosine-3'-phosphate
  modified_base 15: mod_base = OTHER; note = 2'-O-methylcytidine-3'-phosphate
  modified_base 16: mod_base = OTHER; note = 2'-deoxy-2'-fluoroadenosine-3'-phosphate
  modified_base 17: mod_base = OTHER; note = 2'-O-methylcytidine-3'-phosphate
  modified_base 18: mod_base = OTHER; note = 2'-O-methyluridine-3'-phosphate
  modified_base 19: mod_base = OTHER; note = 2'-O-methyladenosine-3'-phosphate
  modified_base 20: mod_base = OTHER; note = 2'-O-methyluridine-3'-phosphate
  modified_base 21: mod_base = OTHER; note = 2'-O-methylcytidine-3'-phosphorothioate
  modified_base 22: mod_base = OTHER; note = 2'-O-methyluridine-3'-phosphorothioate
  modified_base 23: mod_base = OTHER; note = 2'-O-methyladenosine
attctgctactgaacactatcta

SEQ ID NO: 541 - RNA, 23 nt, synthetic construct
  source 1..23: mol_type = other RNA
  modified_base 1: mod_base = OTHER; note = 2'-O-methyladenosine-3'-phosphorothioate
  modified_base 2: mod_base = OTHER; note = 2'-deoxy-2'-fluoroadenosine-3'-phosphorothioate
  modified_base 3: mod_base = OTHER; note = 2'-O-methylguanosine-3'-phosphate
  modified_base 4: mod_base = OTHER; note = 2'-O-methyluridine-3'-phosphate
  modified_base 5: mod_base = OTHER; note = 2'-O-methyluridine-3'-phosphate
  modified_base 6: mod_base = OTHER; note = 2'-deoxy-2'-fluorouridine-3'-phosphate
  modified_base 7: mod_base = OTHER; note = 2'-O-methyladenosine-3'-phosphate
  modified_base 8: mod_base = OTHER; note = 2'-deoxy-2'-fluorouridine-3'-phosphate
  modified_base 9: mod_base = OTHER; note = 2'-deoxy-2'-fluoroguanosine-3'-phosphate
  modified_base 10: mod_base = OTHER; note = 2'-O-methyluridine-3'-phosphate
  modified_base 11: mod_base = OTHER; note = 2'-O-methyluridine-3'-phosphate
  modified_base 12: mod_base = OTHER; note = 2'-O-methylcytidine-3'-phosphate
  modified_base 13: mod_base = OTHER; note = 2'-O-methyladenosine-3'-phosphate
  modified_base 14: mod_base = OTHER; note = 2'-deoxy-2'-fluorouridine-3'-phosphate
  modified_base 15: mod_base = OTHER; note = 2'-O-methyluridine-3'-phosphate
  modified_base 16: mod_base = OTHER; note = 2'-deoxy-2'-fluorocytidine-3'-phosphate
  modified_base 17: mod_base = OTHER; note = 2'-O-methyluridine-3'-phosphate
  modified_base 18: mod_base = OTHER; note = 2'-O-methyladenosine-3'-phosphate
  modified_base 19: mod_base = OTHER; note = 2'-O-methyluridine-3'-phosphate
  modified_base 20: mod_base = OTHER; note = 2'-O-methyluridine-3'-phosphate
  modified_base 21: mod_base = OTHER; note = 2'-O-methylcytidine-3'-phosphorothioate
  modified_base 22: mod_base = OTHER; note = 2'-O-methyluridine-3'-phosphorothioate
  modified_base 23: mod_base = OTHER; note = 2'-O-methylguanosine
aagtttatgttcattctattctg

SEQ ID NO: 542 - RNA, 23 nt, synthetic construct
  source 1..23: mol_type = other RNA
  modified_base 1: mod_base = OTHER; note = 2'-O-methyladenosine-3'-phosphorothioate
  modified_base 2: mod_base = OTHER; note = 2'-deoxy-2'-fluoroadenosine-3'-phosphorothioate
  modified_base 3: mod_base = OTHER; note = 2'-O-methyluridine-3'-phosphate
  modified_base 4: mod_base = OTHER; note = 2'-O-methylguanosine-3'-phosphate
  modified_base 5: mod_base = OTHER; note = 2'-O-methyladenosine-3'-phosphate
  modified_base 6: mod_base = OTHER; note = 2'-deoxy-2'-fluorouridine-3'-phosphate
  modified_base 7: mod_base = OTHER; note = 2'-O-methylcytidine-3'-phosphate
  modified_base 8: mod_base = OTHER; note = 2'-deoxy-2'-fluoroadenosine-3'-phosphate
  modified_base 9: mod_base = OTHER; note = 2'-deoxy-2'-fluoroadenosine-3'-phosphate
  modified_base 10: mod_base = OTHER; note = 2'-O-methyladenosine-3'-phosphate
  modified_base 11: mod_base = OTHER; note = 2'-O-methyluridine-3'-phosphate
  modified_base 12: mod_base = OTHER; note = 2'-O-methyladenosine-3'-phosphate
  modified_base 13: mod_base = OTHER; note = 2'-O-methylguanosine-3'-phosphate
  modified_base 14: mod_base = OTHER; note = 2'-deoxy-2'-fluoroadenosine-3'-phosphate
  modified_base 15: mod_base = OTHER; note = 2'-O-methyladenosine-3'-phosphate
  modified_base 16: mod_base = OTHER; note = 2'-deoxy-2'-fluoroguanosine-3'-phosphate
  modified_base 17: mod_base = OTHER; note = 2'-O-methylguanosine-3'-phosphate
  modified_base 18: mod_base = OTHER; note = 2'-O-methyladenosine-3'-phosphate
  modified_base 19: mod_base = OTHER; note = 2'-O-methyladenosine-3'-phosphate
  modified_base 20: mod_base = OTHER; note = 2'-O-methyluridine-3'-phosphate
  modified_base 21: mod_base = OTHER; note = 2'-O-methyluridine-3'-phosphorothioate
  modified_base 22: mod_base = OTHER; note = 2'-O-methyluridine-3'-phosphorothioate
  modified_base 23: mod_base = OTHER; note = 2'-O-methylcytidine
aatgatcaaatagaaggaatttc

SEQ ID NO: 543 - RNA, 23 nt, synthetic construct
  source 1..23: mol_type = other RNA
  modified_base 1: mod_base = OTHER; note = 2'-O-methyladenosine-3'-phosphorothioate
  modified_base 2: mod_base = OTHER; note = 2'-deoxy-2'-fluorocytidine-3'-phosphorothioate
  modified_base 3: mod_base = OTHER; note = 2'-O-methyluridine-3'-phosphate
  modified_base 4: mod_base = OTHER; note = 2'-O-methyladenosine-3'-phosphate
  modified_base 5: mod_base = OTHER; note = 2'-O-methylguanosine-3'-phosphate
  modified_base 6: mod_base = OTHER; note = 2'-deoxy-2'-fluoroguanosine-3'-phosphate
  modified_base 7: mod_base = OTHER; note = 2'-O-methyluridine-3'-phosphate
  modified_base 8: mod_base = OTHER; note = 2'-deoxy-2'-fluoroadenosine-3'-phosphate
  modified_base 9: mod_base = OTHER; note = 2'-deoxy-2'-fluorouridine-3'-phosphate
  modified_base 10: mod_base = OTHER; note = 2'-O-methyluridine-3'-phosphate
  modified_base 11: mod_base = OTHER; note = 2'-O-methyladenosine-3'-phosphate
  modified_base 12: mod_base = OTHER; note = 2'-O-methyladenosine-3'-phosphate
  modified_base 13: mod_base = OTHER; note = 2'-O-methylguanosine-3'-phosphate
  modified_base 14: mod_base = OTHER; note = 2'-deoxy-2'-fluorouridine-3'-phosphate
  modified_base 15: mod_base = OTHER; note = 2'-O-methyluridine-3'-phosphate
  modified_base 16: mod_base = OTHER; note = 2'-deoxy-2'-fluoroguanosine-3'-phosphate
  modified_base 17: mod_base = OTHER; note = 2'-O-methylguanosine-3'-phosphate
  modified_base 18: mod_base = OTHER; note = 2'-O-methyladenosine-3'-phosphate
  modified_base 19: mod_base = OTHER; note = 2'-O-methylcytidine-3'-phosphate
  modified_base 20: mod_base = OTHER; note = 2'-O-methyluridine-3'-phosphate
  modified_base 21: mod_base = OTHER; note = 2'-O-methyladenosine-3'-phosphorothioate
  modified_base 22: mod_base = OTHER; note = 2'-O-methyluridine-3'-phosphorothioate
  modified_base 23: mod_base = OTHER; note = 2'-O-methyladenosine
actaggtattaagttggactata

SEQ ID NO: 544 - RNA, 23 nt, synthetic construct
  source 1..23: mol_type = other RNA
  modified_base 1: mod_base = OTHER; note = 2'-O-methyladenosine-3'-phosphorothioate
  modified_base 2: mod_base = OTHER; note = 2'-deoxy-2'-fluorouridine-3'-phosphorothioate
  modified_base 3: mod_base = OTHER; note = 2'-O-methyladenosine-3'-phosphate
  modified_base 4: mod_base = OTHER; note = 2'-O-methyluridine-3'-phosphate
  modified_base 5: mod_base = OTHER; note = 2'-O-methyladenosine-3'-phosphate
  modified_base 6: mod_base = OTHER; note = 2'-deoxy-2'-fluorocytidine-3'-phosphate
  modified_base 7: mod_base = OTHER; note = 2'-O-methyladenosine-3'-phosphate
  modified_base 8: mod_base = OTHER; note = 2'-deoxy-2'-fluoroadenosine-3'-phosphate
  modified_base 9: mod_base = OTHER; note = 2'-deoxy-2'-fluorocytidine-3'-phosphate
  modified_base 10: mod_base = OTHER; note = 2'-O-methyluridine-3'-phosphate
  modified_base 11: mod_base = OTHER; note = 2'-O-methylcytidine-3'-phosphate
  modified_base 12: mod_base = OTHER; note = 2'-O-methyladenosine-3'-phosphate
  modified_base 13: mod_base = OTHER; note = 2'-O-methyluridine-3'-phosphate
  modified_base 14: mod_base = OTHER; note = 2'-deoxy-2'-fluoroadenosine-3'-phosphate
  modified_base 15: mod_base = OTHER; note = 2'-O-methyladenosine-3'-phosphate
  modified_base 16: mod_base = OTHER; note = 2'-deoxy-2'-fluoroguanosine-3'-phosphate
  modified_base 17: mod_base = OTHER; note = 2'-O-methylguanosine-3'-phosphate
  modified_base 18: mod_base = OTHER; note = 2'-O-methylcytidine-3'-phosphate
  modified_base 19: mod_base = OTHER; note = 2'-O-methyluridine-3'-phosphate
  modified_base 20: mod_base = OTHER; note = 2'-O-methyladenosine-3'-phosphate
  modified_base 21: mod_base = OTHER; note = 2'-O-methylguanosine-3'-phosphorothioate
  modified_base 22: mod_base = OTHER; note = 2'-O-methylguanosine-3'-phosphorothioate
  modified_base 23: mod_base = OTHER; note = 2'-O-methyluridine
atatacaactcataaggctaggt

SEQ ID NO: 545 - RNA, 23 nt, synthetic construct
  source 1..23: mol_type = other RNA
  modified_base 1: mod_base = OTHER; note = 2'-O-methyladenosine-3'-phosphorothioate
  modified_base 2: mod_base = OTHER; note = 2'-deoxy-2'-fluoroguanosine-3'-phosphorothioate
  modified_base 3: mod_base = OTHER; note = 2'-O-methyluridine-3'-phosphate
  modified_base 4: mod_base = OTHER; note = 2'-O-methyladenosine-3'-phosphate
  modified_base 5: mod_base = OTHER; note = 2'-O-methylguanosine-3'-phosphate
  modified_base 6: mod_base = OTHER; note = 2'-deoxy-2'-fluoroguanosine-3'-phosphate
  modified_base 7: mod_base = OTHER; note = 2'-O-methyluridine-3'-phosphate
  modified_base 8: mod_base = OTHER; note = 2'-deoxy-2'-fluoroadenosine-3'-phosphate
  modified_base 9: mod_base = OTHER; note = 2'-deoxy-2'-fluoroadenosine-3'-phosphate
  modified_base 10: mod_base = OTHER; note = 2'-O-methylcytidine-3'-phosphate
  modified_base 11: mod_base = OTHER; note = 2'-O-methylcytidine-3'-phosphate
  modified_base 12: mod_base = OTHER; note = 2'-O-methyluridine-3'-phosphate
  modified_base 13: mod_base = OTHER; note = 2'-O-methyluridine-3'-phosphate
  modified_base 14: mod_base = OTHER; note = 2'-deoxy-2'-fluoroadenosine-3'-phosphate
  modified_base 15: mod_base = OTHER; note = 2'-O-methylcytidine-3'-phosphate
  modified_base 16: mod_base = OTHER; note = 2'-deoxy-2'-fluorocytidine-3'-phosphate
  modified_base 17: mod_base = OTHER; note = 2'-O-methyluridine-3'-phosphate
  modified_base 18: mod_base = OTHER; note = 2'-O-methyluridine-3'-phosphate
  modified_base 19: mod_base = OTHER; note = 2'-O-methyladenosine-3'-phosphate
  modified_base 20: mod_base = OTHER; note = 2'-O-methyluridine-3'-phosphate
  modified_base 21: mod_base = OTHER; note = 2'-O-methyladenosine-3'-phosphorothioate
  modified_base 22: mod_base = OTHER; note = 2'-O-methylcytidine-3'-phosphorothioate
  modified_base 23: mod_base = OTHER; note = 2'-O-methyladenosine
agtaggtaaccttaccttataca

SEQ ID NO: 546 - RNA, 23 nt, synthetic construct
  source 1..23: mol_type = other RNA
  modified_base 1: mod_base = OTHER; note = 2'-O-methyladenosine-3'-phosphorothioate
  modified_base 2: mod_base = OTHER; note = 2'-deoxy-2'-fluoroadenosine-3'-phosphorothioate
  modified_base 3: mod_base = OTHER; note = 2'-O-methyluridine-3'-phosphate
  modified_base 4: mod_base = OTHER; note = 2'-O-methylcytidine-3'-phosphate
  modified_base 5: mod_base = OTHER; note = 2'-O-methyladenosine-3'-phosphate
  modified_base 6: mod_base = OTHER; note = 2'-deoxy-2'-fluoroguanosine-3'-phosphate
  modified_base 7: mod_base = OTHER; note = 2'-O-methylcytidine-3'-phosphate
  modified_base 8: mod_base = OTHER; note = 2'-deoxy-2'-fluorouridine-3'-phosphate
  modified_base 9: mod_base = OTHER; note = 2'-deoxy-2'-fluorouridine-3'-phosphate
  modified_base 10: mod_base = OTHER; note = 2'-O-methylcytidine-3'-phosphate
  modified_base 11: mod_base = OTHER; note = 2'-O-methyluridine-3'-phosphate
  modified_base 12: mod_base = OTHER; note = 2'-O-methylcytidine-3'-phosphate
  modified_base 13: mod_base = OTHER; note = 2'-O-methyladenosine-3'-phosphate
  modified_base 14: mod_base = OTHER; note = 2'-deoxy-2'-fluoroguanosine-3'-phosphate
  modified_base 15: mod_base = OTHER; note = 2'-O-methylguanosine-3'-phosphate
  modified_base 16: mod_base = OTHER; note = 2'-deoxy-2'-fluorouridine-3'-phosphate
  modified_base 17: mod_base = OTHER; note = 2'-O-methyladenosine-3'-phosphate
  modified_base 18: mod_base = OTHER; note = 2'-O-methylguanosine-3'-phosphate
  modified_base 19: mod_base = OTHER; note = 2'-O-methylguanosine-3'-phosphate
  modified_base 20: mod_base = OTHER; note = 2'-O-methyluridine-3'-phosphate
  modified_base 21: mod_base = OTHER; note = 2'-O-methyladenosine-3'-phosphorothioate
  modified_base 22: mod_base = OTHER; note = 2'-O-methyladenosine-3'-phosphorothioate
  modified_base 23: mod_base = OTHER; note = 2'-O-methylcytidine
aatcagcttctcaggtaggtaac

SEQ ID NO: 547 - RNA, 23 nt, synthetic construct
  source 1..23: mol_type = other RNA
  modified_base 1: mod_base = OTHER; note = 2'-O-methyladenosine-3'-phosphorothioate
  modified_base 2: mod_base = OTHER; note = 2'-deoxy-2'-fluoroadenosine-3'-phosphorothioate
  modified_base 3: mod_base = OTHER; note = 2'-O-methylcytidine-3'-phosphate
  modified_base 4: mod_base = OTHER; note = 2'-O-methyladenosine-3'-phosphate
  modified_base 5: mod_base = OTHER; note = 2'-O-methyladenosine-3'-phosphate
  modified_base 6: mod_base = OTHER; note = 2'-deoxy-2'-fluorocytidine-3'-phosphate
  modified_base 7: mod_base = OTHER; note = 2'-O-methylcytidine-3'-phosphate
  modified_base 8: mod_base = OTHER; note = 2'-deoxy-2'-fluoroadenosine-3'-phosphate
  modified_base 9: mod_base = OTHER; note = 2'-deoxy-2'-fluoroadenosine-3'-phosphate
  modified_base 10: mod_base = OTHER; note = 2'-O-methyluridine-3'-phosphate
  modified_base 11: mod_base = OTHER; note = 2'-O-methylguanosine-3'-phosphate
  modified_base 12: mod_base = OTHER; note = 2'-O-methyluridine-3'-phosphate
  modified_base 13: mod_base = OTHER; note = 2'-O-methyluridine-3'-phosphate
  modified_base 14: mod_base = OTHER; note = 2'-deoxy-2'-fluoroadenosine-3'-phosphate
  modified_base 15: mod_base = OTHER; note = 2'-O-methyladenosine-3'-phosphate
  modified_base 16: mod_base = OTHER; note = 2'-deoxy-2'-fluorouridine-3'-phosphate
  modified_base 17: mod_base = OTHER; note = 2'-O-methylcytidine-3'-phosphate
  modified_base 18: mod_base = OTHER; note = 2'-O-methyladenosine-3'-phosphate
  modified_base 19: mod_base = OTHER; note = 2'-O-methylguanosine-3'-phosphate
  modified_base 20: mod_base = OTHER; note = 2'-O-methylcytidine-3'-phosphate
  modified_base 21: mod_base = OTHER; note = 2'-O-methyluridine-3'-phosphorothioate
  modified_base 22: mod_base = OTHER; note = 2'-O-methyluridine-3'-phosphorothioate
  modified_base 23: mod_base = OTHER; note = 2'-O-methylcytidine
aacaaccaatgttaatcagcttc

SEQ ID NO: 548 - RNA, 23 nt, synthetic construct
  source 1..23: mol_type = other RNA
  modified_base 1: mod_base = OTHER; note = 2'-O-methyladenosine-3'-phosphorothioate
  modified_base 2: mod_base = OTHER; note = 2'-deoxy-2'-fluorouridine-3'-phosphorothioate
  modified_base 3: mod_base = OTHER; note = 2'-O-methyladenosine-3'-phosphate
  modified_base 4: mod_base = OTHER; note = 2'-O-methyladenosine-3'-phosphate
  modified_base 5: mod_base = OTHER; note = 2'-O-methyluridine-3'-phosphate
  modified_base 6: mod_base = OTHER; note = 2'-deoxy-2'-fluoroguanosine-3'-phosphate
  modified_base 7: mod_base = OTHER; note = 2'-O-methyladenosine-3'-phosphate
  modified_base 8: mod_base = OTHER; note = 2'-deoxy-2'-fluoroadenosine-3'-phosphate
  modified_base 9: mod_base = OTHER; note = 2'-deoxy-2'-fluorouridine-3'-phosphate
  modified_base 10: mod_base = OTHER; note = 2'-O-methyladenosine-3'-phosphate
  modified_base 11: mod_base = OTHER; note = 2'-O-methyladenosine-3'-phosphate
  modified_base 12: mod_base = OTHER; note = 2'-O-methylguanosine-3'-phosphate
  modified_base 13: mod_base = OTHER; note = 2'-O-methyladenosine-3'-phosphate
  modified_base 14: mod_base = OTHER; note = 2'-deoxy-2'-fluorouridine-3'-phosphate
  modified_base 15: mod_base = OTHER; note = 2'-O-methyluridine-3'-phosphate
  modified_base 16: mod_base = OTHER; note = 2'-deoxy-2'-fluoroguanosine-3'-phosphate
  modified_base 17: mod_base = OTHER; note = 2'-O-methyluridine-3'-phosphate
  modified_base 18: mod_base = OTHER; note = 2'-O-methyladenosine-3'-phosphate
  modified_base 19: mod_base = OTHER; note = 2'-O-methylcytidine-3'-phosphate
  modified_base 20: mod_base = OTHER; note = 2'-O-methyladenosine-3'-phosphate
  modified_base 21: mod_base = OTHER; note = 2'-O-methyladenosine-3'-phosphorothioate
  modified_base 22: mod_base = OTHER; note = 2'-O-methylcytidine-3'-phosphorothioate
  modified_base 23: mod_base = OTHER; note = 2'-O-methylcytidine
ataatgaataagattgtacaacc

SEQ ID NO: 549 - RNA, 23 nt, synthetic construct
  source 1..23: mol_type = other RNA
  modified_base 1: mod_base = OTHER; note = 2'-O-methyladenosine-3'-phosphorothioate
  modified_base 2: mod_base = OTHER; note = 2'-deoxy-2'-fluorouridine-3'-phosphorothioate
  modified_base 3: mod_base = OTHER; note = 2'-O-methyladenosine-3'-phosphate
  modified_base 4: mod_base = OTHER; note = 2'-O-methyladenosine-3'-phosphate
  modified_base 5: mod_base = OTHER; note = 2'-O-methylguanosine-3'-phosphate
  modified_base 6: mod_base = OTHER; note = 2'-deoxy-2'-fluorocytidine-3'-phosphate
  modified_base 7: mod_base = OTHER; note = 2'-O-methyladenosine-3'-phosphate
  modified_base 8: mod_base = OTHER; note = 2'-deoxy-2'-fluorocytidine-3'-phosphate
  modified_base 9: mod_base = OTHER; note = 2'-deoxy-2'-fluorocytidine-3'-phosphate
  modified_base 10: mod_base = OTHER; note = 2'-O-methyladenosine-3'-phosphate
  modified_base 11: mod_base = OTHER; note = 2'-O-methyluridine-3'-phosphate
  modified_base 12: mod_base = OTHER; note = 2'-O-methylguanosine-3'-phosphate
  modified_base 13: mod_base = OTHER; note = 2'-O-methyluridine-3'-phosphate
  modified_base 14: mod_base = OTHER; note = 2'-deoxy-2'-fluorouridine-3'-phosphate
  modified_base 15: mod_base = OTHER; note = 2'-O-methylcytidine-3'-phosphate
  modified_base 16: mod_base = OTHER; note = 2'-deoxy-2'-fluorouridine-3'-phosphate
  modified_base 17: mod_base = OTHER; note = 2'-O-methylcytidine-3'-phosphate
  modified_base 18: mod_base = OTHER; note = 2'-O-methyluridine-3'-phosphate
  modified_base 19: mod_base = OTHER; note = 2'-O-methyladenosine-3'-phosphate
  modified_base 20: mod_base = OTHER; note = 2'-O-methyladenosine-3'-phosphate
  modified_base 21: mod_base = OTHER; note = 2'-O-methyluridine-3'-phosphorothioate
  modified_base 22: mod_base = OTHER; note = 2'-O-methylguanosine-3'-phosphorothioate
  modified_base 23: mod_base = OTHER; note = 2'-O-methyladenosine
ataagcaccatgttctctaatga

SEQ ID NO: 550 - RNA, 23 nt, synthetic construct
  source 1..23: mol_type = other RNA
  modified_base 1: mod_base = OTHER; note = 2'-O-methyladenosine-3'-phosphorothioate
  modified_base 2: mod_base = OTHER; note = 2'-deoxy-2'-fluoroguanosine-3'-phosphorothioate
  modified_base 3: mod_base = OTHER; note = 2'-O-methylguanosine-3'-phosphate
  modified_base 4: mod_base = OTHER; note = 2'-O-methyluridine-3'-phosphate
  modified_base 5: mod_base = OTHER; note = 2'-O-methylcytidine-3'-phosphate
  modified_base 6: mod_base = OTHER; note = 2'-deoxy-2'-fluorouridine-3'-phosphate
  modified_base 7: mod_base = OTHER; note = 2'-O-methylcytidine-3'-phosphate
  modified_base 8: mod_base = OTHER; note = 2'-deoxy-2'-fluoroadenosine-3'-phosphate
  modified_base 9: mod_base = OTHER; note = 2'-deoxy-2'-fluoroguanosine-3'-phosphate
  modified_base 10: mod_base = OTHER; note = 2'-O-methyladenosine-3'-phosphate
  modified_base 11: mod_base = OTHER; note = 2'-O-methylcytidine-3'-phosphate
  modified_base 12: mod_base = OTHER; note = 2'-O-methylcytidine-3'-phosphate
  modified_base 13: mod_base = OTHER; note = 2'-O-methylcytidine-3'-phosphate
  modified_base 14: mod_base = OTHER; note = 2'-deoxy-2'-fluorouridine-3'-phosphate
  modified_base 15: mod_base = OTHER; note = 2'-O-methyladenosine-3'-phosphate
  modified_base 16: mod_base = OTHER; note = 2'-deoxy-2'-fluoroadenosine-3'-phosphate
  modified_base 17: mod_base = OTHER; note = 2'-O-methylguanosine-3'-phosphate
  modified_base 18: mod_base = OTHER; note = 2'-O-methylcytidine-3'-phosphate
  modified_base 19: mod_base = OTHER; note = 2'-O-methyladenosine-3'-phosphate
  modified_base 20: mod_base = OTHER; note = 2'-O-methylcytidine-3'-phosphate
  modified_base 21: mod_base = OTHER; note = 2'-O-methylcytidine-3'-phosphorothioate
  modified_base 22: mod_base = OTHER; note = 2'-O-methyladenosine-3'-phosphorothioate
  modified_base 23: mod_base = OTHER; note = 2'-O-methyluridine
aggtctcagaccctaagcaccat

SEQ ID NO: 551 - RNA, 23 nt, synthetic construct
  source 1..23: mol_type = other RNA
  modified_base 1: mod_base = OTHER; note = 2'-O-methyladenosine-3'-phosphorothioate
  modified_base 2: mod_base = OTHER; note = 2'-deoxy-2'-fluoroadenosine-3'-phosphorothioate
  modified_base 3: mod_base = OTHER; note = 2'-O-methylguanosine-3'-phosphate
  modified_base 4: mod_base = OTHER; note = 2'-O-methyladenosine-3'-phosphate
  modified_base 5: mod_base = OTHER; note = 2'-O-methylcytidine-3'-phosphate
  modified_base 6: mod_base = OTHER; note = 2'-deoxy-2'-fluorocytidine-3'-phosphate
  modified_base 7: mod_base = OTHER; note = 2'-O-methyluridine-3'-phosphate
  modified_base 8: mod_base = OTHER; note = 2'-deoxy-2'-fluorouridine-3'-phosphate
  modified_base 9: mod_base = OTHER; note = 2'-deoxy-2'-fluorouridine-3'-phosphate
  modified_base 10: mod_base = OTHER; note = 2'-O-methylcytidine-3'-phosphate
  modified_base 11: mod_base = OTHER; note = 2'-O-methyladenosine-3'-phosphate
  modified_base 12: mod_base = OTHER; note = 2'-O-methyladenosine-3'-phosphate
  modified_base 13: mod_base = OTHER; note = 2'-O-methyladenosine-3'-phosphate
  modified_base 14: mod_base = OTHER; note = 2'-deoxy-2'-fluoroadenosine-3'-phosphate
  modified_base 15: mod_base = OTHER; note = 2'-O-methylguanosine-3'-phosphate
  modified_base 16: mod_base = OTHER; note = 2'-deoxy-2'-fluoroguanosine-3'-phosphate
  modified_base 17: mod_base = OTHER; note = 2'-O-methyluridine-3'-phosphate
  modified_base 18: mod_base = OTHER; note = 2'-O-methylcytidine-3'-phosphate
  modified_base 19: mod_base = OTHER; note = 2'-O-methyluridine-3'-phosphate
  modified_base 20: mod_base = OTHER; note = 2'-O-methylcytidine-3'-phosphate
  modified_base 21: mod_base = OTHER; note = 2'-O-methyladenosine-3'-phosphorothioate
  modified_base 22: mod_base = OTHER; note = 2'-O-methylguanosine-3'-phosphorothioate
  modified_base 23: mod_base = OTHER; note = 2'-O-methyladenosine
aagacctttcaaaaggtctcaga

SEQ ID NO: 552 - RNA, 23 nt, synthetic construct
  source 1..23: mol_type = other RNA
  modified_base 1: mod_base = OTHER; note = 2'-O-methyladenosine-3'-phosphorothioate
  modified_base 2: mod_base = OTHER; note = 2'-deoxy-2'-fluorouridine-3'-phosphorothioate
  modified_base 3: mod_base = OTHER; note = 2'-O-methyladenosine-3'-phosphate
  modified_base 4: mod_base = OTHER; note = 2'-O-methyladenosine-3'-phosphate
  modified_base 5: mod_base = OTHER; note = 2'-O-methyladenosine-3'-phosphate
  modified_base 6: mod_base = OTHER; note = 2'-deoxy-2'-fluoroguanosine-3'-phosphate
  modified_base 7: mod_base = OTHER; note = 2'-O-methyladenosine-3'-phosphate
  modified_base 8: mod_base = OTHER; note = 2'-deoxy-2'-fluoroguanosine-3'-phosphate
  modified_base 9: mod_base = OTHER; note = 2'-deoxy-2'-fluorouridine-3'-phosphate
  modified_base 10: mod_base = OTHER; note = 2'-O-methyluridine-3'-phosphate
  modified_base 11: mod_base = OTHER; note = 2'-O-methylcytidine-3'-phosphate
  modified_base 12: mod_base = OTHER; note = 2'-O-methyluridine-3'-phosphate
  modified_base 13: mod_base = OTHER; note = 2'-O-methylcytidine-3'-phosphate
  modified_base 14: mod_base = OTHER; note = 2'-deoxy-2'-fluoroadenosine-3'-phosphate
  modified_base 15: mod_base = OTHER; note = 2'-O-methylguanosine-3'-phosphate
  modified_base 16: mod_base = OTHER; note = 2'-deoxy-2'-fluoroadenosine-3'-phosphate
  modified_base 17: mod_base = OTHER; note = 2'-O-methylcytidine-3'-phosphate
  modified_base 18: mod_base = OTHER; note = 2'-O-methylcytidine-3'-phosphate
  modified_base 19: mod_base = OTHER; note = 2'-O-methyluridine-3'-phosphate
  modified_base 20: mod_base = OTHER; note = 2'-O-methyluridine-3'-phosphate
  modified_base 21: mod_base = OTHER; note = 2'-O-methyluridine-3'-phosphorothioate
  modified_base 22: mod_base = OTHER; note = 2'-O-methylcytidine-3'-phosphorothioate
  modified_base 23: mod_base = OTHER; note = 2'-O-methyladenosine
ataaagagttctcagacctttca

SEQ ID NO: 553 - RNA, 23 nt, synthetic construct
  source 1..23: mol_type = other RNA
  modified_base 1: mod_base = OTHER; note = 2'-O-methyladenosine-3'-phosphorothioate
  modified_base 2: mod_base = OTHER; note = 2'-deoxy-2'-fluorouridine-3'-phosphorothioate
  modified_base 3: mod_base = OTHER; note = 2'-O-methyluridine-3'-phosphate
  modified_base 4: mod_base = OTHER; note = 2'-O-methyladenosine-3'-phosphate
  modified_base 5: mod_base = OTHER; note = 2'-O-methyladenosine-3'-phosphate
  modified_base 6: mod_base = OTHER; note = 2'-deoxy-2'-fluorocytidine-3'-phosphate
  modified_base 7: mod_base = OTHER; note = 2'-O-methyladenosine-3'-phosphate
  modified_base 8: mod_base = OTHER; note = 2'-deoxy-2'-fluorouridine-3'-phosphate
  modified_base 9: mod_base = OTHER; note = 2'-deoxy-2'-fluoroguanosine-3'-phosphate
  modified_base 10: mod_base = OTHER; note = 2'-O-methyladenosine-3'-phosphate
  modified_base 11: mod_base = OTHER; note = 2'-O-methyluridine-3'-phosphate
  modified_base 12: mod_base = OTHER; note = 2'-O-methyladenosine-3'-phosphate
  modified_base 13: mod_base = OTHER; note = 2'-O-methylcytidine-3'-phosphate
  modified_base 14: mod_base = OTHER; note = 2'-deoxy-2'-fluoroadenosine-3'-phosphate
  modified_base 15: mod_base = OTHER; note = 2'-O-methyluridine-3'-phosphate
  modified_base 16: mod_base = OTHER; note = 2'-deoxy-2'-fluoroadenosine-3'-phosphate
  modified_base 17: mod_base = OTHER; note = 2'-O-methylcytidine-3'-phosphate
  modified_base 18: mod_base = OTHER; note = 2'-O-methyluridine-3'-phosphate
  modified_base 19: mod_base = OTHER; note = 2'-O-methylguanosine-3'-phosphate
  modified_base 20: mod_base = OTHER; note = 2'-O-methyladenosine-3'-phosphate
  modified_base 21: mod_base = OTHER; note = 2'-O-methyluridine-3'-phosphorothioate
  modified_base 22: mod_base = OTHER; note = 2'-O-methylguanosine-3'-phosphorothioate
  modified_base 23: mod_base = OTHER; note = 2'-O-methyluridine
attaacatgatacatactgatgt

SEQ ID NO: 554 - RNA, 23 nt, synthetic construct
  source 1..23: mol_type = other RNA
  modified_base 14: mod_base = OTHER; note = 5'-methyluridine-3'-phosphate
  modified_base 16: mod_base = OTHER; note = 5'-methyluridine-3'-phosphate
  modified_base 22: mod_base = OTHER; note = 5'-methyluridine-3'-phosphate
agcaagagcagcatgtcagcctg

SEQ ID NO: 555 - RNA, 23 nt, synthetic construct
  source 1..23: mol_type = other RNA
  modified_base 8: mod_base = OTHER; note = 5'-methyluridine-3'-phosphate
  modified_base 9: mod_base = OTHER; note = 5'-methyluridine-3'-phosphate
  modified_base 10: mod_base = OTHER; note = 5'-methyluridine-3'-phosphate
  modified_base 15: mod_base = OTHER; note = 5'-methyluridine-3'-phosphate
  modified_base 16: mod_base = OTHER; note = 5'-methyluridine-3'-phosphate
  modified_base 21: mod_base = OTHER; note = 5'-methyluridine-3'-phosphate
  modified_base 23: mod_base = OTHER; note = 5'-methyluridine
ccggagctttgcagttgcaatct

SEQ ID NO: 556 - RNA, 23 nt, synthetic construct
  source 1..23: mol_type = other RNA
  modified_base 5: mod_base = OTHER; note = 5'-methyluridine-3'-phosphate
  modified_base 7: mod_base = OTHER; note = 5'-methyluridine-3'-phosphate
  modified_base 11: mod_base = OTHER; note = 5'-methyluridine-3'-phosphate
  modified_base 12: mod_base = OTHER; note = 5'-methyluridine-3'-phosphate
  modified_base 13: mod_base = OTHER; note = 5'-methyluridine-3'-phosphate
  modified_base 14: mod_base = OTHER; note = 5'-methyluridine-3'-phosphate
  modified_base 20: mod_base = OTHER; note = 5'-methyluridine-3'-phosphate
gcaatctgcattttagaaataag

SEQ ID NO: 557 - RNA, 23 nt, synthetic construct
  source 1..23: mol_type = other RNA
  modified_base 1: mod_base = OTHER; note = 5'-methyluridine-3'-phosphate
  modified_base 2: mod_base = OTHER; note = 5'-methyluridine-3'-phosphate
  modified_base 8: mod_base = OTHER; note = 5'-methyluridine-3'-phosphate
  modified_base 14: mod_base = OTHER; note = 5'-methyluridine-3'-phosphate
  modified_base 17: mod_base = OTHER; note = 5'-methyluridine-3'-phosphate
ttagaaataagcatcctcacagc

SEQ ID NO: 558 - RNA, 23 nt, synthetic construct
  source 1..23: mol_type = other RNA
  modified_base 8: mod_base = OTHER; note = 5'-methyluridine-3'-phosphate
  modified_base 19: mod_base = OTHER; note = 5'-methyluridine-3'-phosphate
  modified_base 20: mod_base = OTHER; note = 5'-methyluridine-3'-phosphate
  modified_base 22: mod_base = OTHER; note = 5'-methyluridine-3'-phosphate
agcacagtacacgaccagttatg

SEQ ID NO: 559 - RNA, 23 nt, synthetic construct
  source 1..23: mol_type = other RNA
  modified_base 9: mod_base = OTHER; note = 5'-methyluridine-3'-phosphate
  modified_base 22: mod_base = OTHER; note = 5'-methyluridine-3'-phosphate
cccagagctaacagaaagcagtg

SEQ ID NO: 560 - RNA, 23 nt, synthetic construct
  source 1..23: mol_type = other RNA
  modified_base 6: mod_base = OTHER; note = 5'-methyluridine-3'-phosphate
  modified_base 10: mod_base = OTHER; note = 5'-methyluridine-3'-phosphate
  modified_base 12: mod_base = OTHER; note = 5'-methyluridine-3'-phosphate
  modified_base 16: mod_base = OTHER; note = 5'-methyluridine-3'-phosphate
  modified_base 23: mod_base = OTHER; note = 5'-methyluridine
agcagtggctctgcatcacacat

SEQ ID NO: 561 - RNA, 23 nt, synthetic construct
  source 1..23: mol_type = other RNA
  modified_base 4: mod_base = OTHER; note = 5'-methyluridine-3'-phosphate
  modified_base 11: mod_base = OTHER; note = 5'-methyluridine-3'-phosphate
  modified_base 16: mod_base = OTHER; note = 5'-methyluridine-3'-phosphate
  modified_base 23: mod_base = OTHER; note = 5'-methyluridine
gcatcacacatagactgcagaat

SEQ ID NO: 562 - RNA, 23 nt, synthetic construct
  source 1..23: mol_type = other RNA
  modified_base 4: mod_base = OTHER; note = 5'-methyluridine-3'-phosphate
  modified_base 8: mod_base = OTHER; note = 5'-methyluridine-3'-phosphate
  modified_base 11: mod_base = OTHER; note = 5'-methyluridine-3'-phosphate
  modified_base 17: mod_base = OTHER; note = 5'-methyluridine-3'-phosphate
  modified_base 22: mod_base = OTHER; note = 5'-methyluridine-3'-phosphate
gagtgaatggtcacaatgcgatc

SEQ ID NO: 563 - RNA, 23 nt, synthetic construct
  source 1..23: mol_type = other RNA
  modified_base 3: mod_base = OTHER; note = 5'-methyluridine-3'-phosphate
  modified_base 8: mod_base = OTHER; note = 5'-methyluridine-3'-phosphate
  modified_base 11: mod_base = OTHER; note = 5'-methyluridine-3'-phosphate
  modified_base 12: mod_base = OTHER; note = 5'-methyluridine-3'-phosphate
  modified_base 14: mod_base = OTHER; note = 5'-methyluridine-3'-phosphate
  modified_base 16: mod_base = OTHER; note = 5'-methyluridine-3'-phosphate
aatgcgatccttgtctcagacaa

SEQ ID NO: 564 - RNA, 23 nt, synthetic construct
  source 1..23: mol_type = other RNA
  modified_base 1: mod_base = OTHER; note = 5'-methyluridine-3'-phosphate
  modified_base 3: mod_base = OTHER; note = 5'-methyluridine-3'-phosphate
  modified_base 12: mod_base = OTHER; note = 5'-methyluridine-3'-phosphate
  modified_base 14: mod_base = OTHER; note = 5'-methyluridine-3'-phosphate
  modified_base 15: mod_base = OTHER; note = 5'-methyluridine-3'-phosphate
  modified_base 16: mod_base = OTHER; note = 5'-methyluridine-3'-phosphate
  modified_base 19: mod_base = OTHER; note = 5'-methyluridine-3'-phosphate
  modified_base 20: mod_base = OTHER; note = 5'-methyluridine-3'-phosphate
tctcagacaaatgtttcgttcaa

SEQ ID NO: 565 - RNA, 23 nt, synthetic construct
  source 1..23: mol_type = other RNA
  modified_base 1: mod_base = OTHER; note = 5'-methyluridine-3'-phosphate
  modified_base 2: mod_base = OTHER; note = 5'-methyluridine-3'-phosphate
  modified_base 12: mod_base = OTHER; note = 5'-methyluridine-3'-phosphate
  modified_base 13: mod_base = OTHER; note = 5'-methyluridine-3'-phosphate
  modified_base 18: mod_base = OTHER; note = 5'-methyluridine-3'-phosphate
  modified_base 20: mod_base = OTHER; note = 5'-methyluridine-3'-phosphate
  modified_base 21: mod_base = OTHER; note = 5'-methyluridine-3'-phosphate
  modified_base 22: mod_base = OTHER; note = 5'-methyluridine-3'-phosphate
ttcaagaagcattgaggtctttg

SEQ ID NO: 566 - RNA, 23 nt, synthetic construct
  source 1..23: mol_type = other RNA
  modified_base 1: mod_base = OTHER; note = 5'-methyluridine-3'-phosphate
  modified_base 2: mod_base = OTHER; note = 5'-methyluridine-3'-phosphate
  modified_base 3: mod_base = OTHER; note = 5'-methyluridine-3'-phosphate
  modified_base 10: mod_base = OTHER; note = 5'-methyluridine-3'-phosphate
  modified_base 11: mod_base = OTHER; note = 5'-methyluridine-3'-phosphate
  modified_base 12: mod_base = OTHER; note = 5'-methyluridine-3'-phosphate
  modified_base 15: mod_base = OTHER; note = 5'-methyluridine-3'-phosphate
tttggacaatttaatgggaaaag

SEQ ID NO: 567 - RNA, 23 nt, synthetic construct
  source 1..23: mol_type = other RNA
  modified_base 1: mod_base = OTHER; note = 5'-methyluridine-3'-phosphate
  modified_base 18: mod_base = OTHER; note = 5'-methyluridine-3'-phosphate
  modified_base 20: mod_base = OTHER; note = 5'-methyluridine-3'-phosphate
  modified_base 22: mod_base = OTHER; note = 5'-methyluridine-3'-phosphate
tgggagacagacgacagtgtgtg

SEQ ID NO: 568 - RNA, 23 nt, synthetic construct
  source 1..23: mol_type = other RNA
  modified_base 4: mod_base = OTHER; note = 5'-methyluridine-3'-phosphate
  modified_base 12: mod_base = OTHER; note = 5'-methyluridine-3'-phosphate
  modified_base 16: mod_base = OTHER; note = 5'-methyluridine-3'-phosphate
  modified_base 17: mod_base = OTHER; note = 5'-methyluridine-3'-phosphate
  modified_base 18: mod_base = OTHER; note = 5'-methyluridine-3'-phosphate
  modified_base 22: mod_base = OTHER; note = 5'-methyluridine-3'-phosphate
gactgcggaaatgactttcaatg

SEQ ID NO: 569 - RNA, 23 nt, synthetic construct
  source 1..23: mol_type = other RNA
  modified_base 4: mod_base = OTHER; note = 5'-methyluridine-3'-phosphate
  modified_base 5: mod_base = OTHER; note = 5'-methyluridine-3'-phosphate
  modified_base 6: mod_base = OTHER; note = 5'-methyluridine-3'-phosphate
  modified_base 10: mod_base = OTHER; note = 5'-methyluridine-3'-phosphate
  modified_base 15: mod_base = OTHER; note = 5'-methyluridine-3'-phosphate
gactttcaatgcagtacaggcag

SEQ ID NO: 570 - RNA, 23 nt, synthetic construct
  source 1..23: mol_type = other RNA
  modified_base 5: mod_base = OTHER; note = 5'-methyluridine-3'-phosphate
  modified_base 9: mod_base = OTHER; note = 5'-methyluridine-3'-phosphate
  modified_base 15: mod_base = OTHER; note = 5'-methyluridine-3'-phosphate
  modified_base 21: mod_base = OTHER; note = 5'-methyluridine-3'-phosphate
  modified_base 22: mod_base = OTHER; note = 5'-methyluridine-3'-phosphate
cagatgcataaagatgcgacttc

SEQ ID NO: 571 - RNA, 23 nt, synthetic construct
  source 1..23: mol_type = other RNA
  modified_base 3: mod_base = OTHER; note = 5'-methyluridine-3'-phosphate
  modified_base 5: mod_base = OTHER; note = 5'-methyluridine-3'-phosphate
  modified_base 8: mod_base = OTHER; note = 5'-methyluridine-3'-phosphate
  modified_base 11: mod_base = OTHER; note = 5'-methyluridine-3'-phosphate
  modified_base 17: mod_base = OTHER; note = 5'-methyluridine-3'-phosphate
  modified_base 21: mod_base = OTHER; note = 5'-methyluridine-3'-phosphate
ggtgtaatggtgacaatgactgc

SEQ ID NO: 572 - RNA, 23 nt, synthetic construct
  source 1..23: mol_type = other RNA
  modified_base 8: mod_base = OTHER; note = 5'-methyluridine-3'-phosphate
  modified_base 9: mod_base = OTHER; note = 5'-methyluridine-3'-phosphate
  modified_base 10: mod_base = OTHER; note = 5'-methyluridine-3'-phosphate
  modified_base 11: mod_base = OTHER; note = 5'-methyluridine-3'-phosphate
  modified_base 16: mod_base = OTHER; note = 5'-methyluridine-3'-phosphate
  modified_base 22: mod_base = OTHER; note = 5'-methyluridine-3'-phosphate
cggagacttttcagatgaggatg

SEQ ID NO: 573 - RNA, 23 nt, synthetic construct
  source 1..23: mol_type = other RNA
  modified_base 2: mod_base = OTHER; note = 5'-methyluridine-3'-phosphate
  modified_base 8: mod_base = OTHER; note = 5'-methyluridine-3'-phosphate
  modified_base 11: mod_base = OTHER; note = 5'-methyluridine-3'-phosphate
  modified_base 12: mod_base = OTHER; note = 5'-methyluridine-3'-phosphate
  modified_base 14: mod_base = OTHER; note = 5'-methyluridine-3'-phosphate
  modified_base 20: mod_base = OTHER; note = 5'-methyluridine-3'-phosphate
atgaggatgattgtgaaagtgag

SEQ ID NO: 574 - RNA, 23 nt, synthetic construct
  source 1..23: mol_type = other RNA
  modified_base 4: mod_base = OTHER; note = 5'-methyluridine-3'-phosphate
  modified_base 17: mod_base = OTHER; note = 5'-methyluridine-3'-phosphate
  modified_base 20: mod_base = OTHER; note = 5'-methyluridine-3'-phosphate
ccctgcagagacagagtggtaga

SEQ ID NO: 575 - RNA, 23 nt, synthetic construct
  source 1..23: mol_type = other RNA
  modified_base 4: mod_base = OTHER; note = 5'-methyluridine-3'-phosphate
  modified_base 7: mod_base = OTHER; note = 5'-methyluridine-3'-phosphate
  modified_base 15: mod_base = OTHER; note = 5'-methyluridine-3'-phosphate
  modified_base 17: mod_base = OTHER; note = 5'-methyluridine-3'-phosphate
  modified_base 22: mod_base = OTHER; note = 5'-methyluridine-3'-phosphate
gagtggtagaagagtctgagctg

SEQ ID NO: 576 - RNA, 23 nt, synthetic construct
  source 1..23: mol_type = other RNA
  modified_base 3: mod_base = OTHER; note = 5'-methyluridine-3'-phosphate
  modified_base 20: mod_base = OTHER; note = 5'-methyluridine-3'-phosphate
  modified_base 22: mod_base = OTHER; note = 5'-methyluridine-3'-phosphate
gctggcacgaacagcaggctatg

SEQ ID NO: 577 - RNA, 23 nt, synthetic construct
  source 1..23: mol_type = other RNA
  modified_base 4: mod_base = OTHER; note = 5'-methyluridine-3'-phosphate
  modified_base 6: mod_base = OTHER; note = 5'-methyluridine-3'-phosphate
  modified_base 11: mod_base = OTHER; note = 5'-methyluridine-3'-phosphate
  modified_base 17: mod_base = OTHER; note = 5'-methyluridine-3'-phosphate
  modified_base 18: mod_base = OTHER; note = 5'-methyluridine-3'-phosphate
  modified_base 19: mod_base = OTHER; note = 5'-methyluridine-3'-phosphate
  modified_base 20: mod_base = OTHER; note = 5'-methyluridine-3'-phosphate
ggctatgggatcaacattttagg

SEQ ID NO: 578 - RNA, 23 nt, synthetic construct
  source 1..23: mol_type = other RNA
  modified_base 8: mod_base = OTHER; note = 5'-methyluridine-3'-phosphate
  modified_base 9: mod_base = OTHER; note = 5'-methyluridine-3'-phosphate
  modified_base 10: mod_base = OTHER; note = 5'-methyluridine-3'-phosphate
  modified_base 11: mod_base = OTHER; note = 5'-methyluridine-3'-phosphate
  modified_base 17: mod_base = OTHER; note = 5'-methyluridine-3'-phosphate
  modified_base 21: mod_base = OTHER; note = 5'-methyluridine-3'-phosphate
  modified_base 22: mod_base = OTHER; note = 5'-methyluridine-3'-phosphate
gcacaccttttgacaatgagttc

SEQ ID NO: 579 - RNA, 23 nt, synthetic construct
  source 1..23: mol_type = other RNA
  modified_base 4: mod_base = OTHER; note = 5'-methyluridine-3'-phosphate
  modified_base 5: mod_base = OTHER; note = 5'-methyluridine-3'-phosphate
  modified_base 7: mod_base = OTHER; note = 5'-methyluridine-3'-phosphate
  modified_base 12: mod_base = OTHER; note = 5'-methyluridine-3'-phosphate
  modified_base 17: mod_base = OTHER; note = 5'-methyluridine-3'-phosphate
  modified_base 19: mod_base = OTHER; note = 5'-methyluridine-3'-phosphate
  modified_base 21: mod_base = OTHER; note = 5'-methyluridine-3'-phosphate
gagttctacaatggactctgtaa

SEQ ID NO: 580 - RNA, 23 nt, synthetic construct
  source 1..23: mol_type = other RNA
  modified_base 3: mod_base = OTHER; note = 5'-methyluridine-3'-phosphate
  modified_base 12: mod_base = OTHER; note = 5'-methyluridine-3'-phosphate
  modified_base 14: mod_base = OTHER; note = 5'-methyluridine-3'-phosphate
  modified_base 19: mod_base = OTHER; note = 5'-methyluridine-3'-phosphate
  modified_base 22: mod_base = OTHER; note = 5'-methyluridine-3'-phosphate
gatggaaacactctgacatacta

SEQ ID NO: 581 - RNA, 23 nt, synthetic construct
  source 1..23: mol_type = other RNA
  modified_base 2: mod_base = OTHER; note = 5'-methyluridine-3'-phosphate
  modified_base 7: mod_base = OTHER; note = 5'-methyluridine-3'-phosphate
  modified_base 10: mod_base = OTHER; note = 5'-methyluridine-3'-phosphate
  modified_base 21: mod_base = OTHER; note = 5'-methyluridine-3'-phosphate
  modified_base 22: mod_base = OTHER; note = 5'-methyluridine-3'-phosphate
ctgacatactaccgaagaccttg

SEQ ID NO: 582 - RNA, 23 nt, synthetic construct
  source 1..23: mol_type = other RNA
  modified_base 1: mod_base = OTHER; note = 5'-methyluridine-3'-phosphate
  modified_base 8: mod_base = OTHER; note = 5'-methyluridine-3'-phosphate
  modified_base 12: mod_base = OTHER; note = 5'-methyluridine-3'-phosphate
  modified_base 13: mod_base = OTHER; note = 5'-methyluridine-3'-phosphate
  modified_base 15: mod_base = OTHER; note = 5'-methyluridine-3'-phosphate
  modified_base 16: mod_base = OTHER; note = 5'-methyluridine-3'-phosphate
  modified_base 17: mod_base = OTHER; note = 5'-methyluridine-3'-phosphate
  modified_base 20: mod_base = OTHER; note = 5'-methyluridine-3'-phosphate
  modified_base 22: mod_base = OTHER; note = 5'-methyluridine-3'-phosphate
tggaacgtggcttctttgatcta

SEQ ID NO: 583 - RNA, 23 nt, synthetic construct
  source 1..23: mol_type = other RNA
  modified_base 1: mod_base = OTHER; note = 5'-methyluridine-3'-phosphate
  modified_base 3: mod_base = OTHER; note = 5'-methyluridine-3'-phosphate
  modified_base 4: mod_base = OTHER; note = 5'-methyluridine-3'-phosphate
  modified_base 5: mod_base = OTHER; note = 5'-methyluridine-3'-phosphate
  modified_base 8: mod_base = OTHER; note = 5'-methyluridine-3'-phosphate
  modified_base 10: mod_base = OTHER; note = 5'-methyluridine-3'-phosphate
  modified_base 12: mod_base = OTHER; note = 5'-methyluridine-3'-phosphate
tctttgatctatgaaaccaaagg

SEQ ID NO: 584 - RNA, 23 nt, synthetic construct
  source 1..23: mol_type = other RNA
  modified_base 12: mod_base = OTHER; note = 5'-methyluridine-3'-phosphate
  modified_base 13: mod_base = OTHER; note = 5'-methyluridine-3'-phosphate
agaaccgaacattacgaagaaca

SEQ ID NO: 585 - RNA, 23 nt, synthetic construct
  source 1..23: mol_type = other RNA
  modified_base 12: mod_base = OTHER; note = 5'-methyluridine-3'-phosphate
  modified_base 13: mod_base = OTHER; note = 5'-methyluridine-3'-phosphate
  modified_base 20: mod_base = OTHER; note = 5'-methyluridine-3'-phosphate
  modified_base 21: mod_base = OTHER; note = 5'-methyluridine-3'-phosphate
  modified_base 22: mod_base = OTHER; note = 5'-methyluridine-3'-phosphate
cgaagaacaaattgaagcattta

SEQ ID NO: 586 - RNA, 23 nt, synthetic construct
  source 1..23: mol_type = other RNA
  modified_base 1: mod_base = OTHER; note = 5'-methyluridine-3'-phosphate
  modified_base 8: mod_base = OTHER; note = 5'-methyluridine-3'-phosphate
  modified_base 9: mod_base = OTHER; note = 5'-methyluridine-3'-phosphate
  modified_base 10: mod_base = OTHER; note = 5'-methyluridine-3'-phosphate
  modified_base 16: mod_base = OTHER; note = 5'-methyluridine-3'-phosphate
  modified_base 18: mod_base = OTHER; note = 5'-methyluridine-3'-phosphate
  modified_base 21: mod_base = OTHER; note = 5'-methyluridine-3'-phosphate
tgaagcatttaaaagtatcatcc

SEQ ID NO: 587 - RNA, 23 nt, synthetic construct
  source 1..23: mol_type = other RNA
  modified_base 3: mod_base = OTHER; note = 5'-methyluridine-3'-phosphate
  modified_base 5: mod_base = OTHER; note = 5'-methyluridine-3'-phosphate
  modified_base 8: mod_base = OTHER; note = 5'-methyluridine-3'-phosphate
  modified_base 22: mod_base = OTHER; note = 5'-methyluridine-3'-phosphate
agtatcatccaagagaagacatc

SEQ ID NO: 588 - RNA, 23 nt, synthetic construct
  source 1..23: mol_type = other RNA
  modified_base 10: mod_base = OTHER; note = 5'-methyluridine-3'-phosphate
  modified_base 15: mod_base = OTHER; note = 5'-methyluridine-3'-phosphate
  modified_base 16: mod_base = OTHER; note = 5'-methyluridine-3'-phosphate
  modified_base 17: mod_base = OTHER; note = 5'-methyluridine-3'-phosphate
  modified_base 18: mod_base = OTHER; note = 5'-methyluridine-3'-phosphate
  modified_base 21: mod_base = OTHER; note = 5'-methyluridine-3'-phosphate
gagaagacatcaaattttaatgc

SEQ ID NO: 589 - RNA, 23 nt, synthetic construct
  source 1..23: mol_type = other RNA
  modified_base 2: mod_base = OTHER; note = 5'-methyluridine-3'-phosphate
  modified_base 3: mod_base = OTHER; note = 5'-methyluridine-3'-phosphate
  modified_base 4: mod_base = OTHER; note = 5'-methyluridine-3'-phosphate
  modified_base 5: mod_base = OTHER; note = 5'-methyluridine-3'-phosphate
  modified_base 8: mod_base = OTHER; note = 5'-methyluridine-3'-phosphate
  modified_base 14: mod_base = OTHER; note = 5'-methyluridine-3'-phosphate
  modified_base 16: mod_base = OTHER; note = 5'-methyluridine-3'-phosphate
  modified_base 18: mod_base = OTHER; note = 5'-methyluridine-3'-phosphate
  modified_base 20: mod_base = OTHER; note = 5'-methyluridine-3'-phosphate
  modified_base 22: mod_base = OTHER; note = 5'-methyluridine-3'-phosphate
attttaatgcagctatatctcta

SEQ ID NO: 590 - RNA, 23 nt, synthetic construct
  source 1..23: mol_type = other RNA
  modified_base 2: mod_base = OTHER; note = 5'-methyluridine-3'-phosphate
  modified_base 4: mod_base = OTHER; note = 5'-methyluridine-3'-phosphate
  modified_base 6: mod_base = OTHER; note = 5'-methyluridine-3'-phosphate
  modified_base 8: mod_base = OTHER; note = 5'-methyluridine-3'-phosphate
  modified_base 10: mod_base = OTHER; note = 5'-methyluridine-3'-phosphate
  modified_base 15: mod_base = OTHER; note = 5'-methyluridine-3'-phosphate
  modified_base 16: mod_base = OTHER; note = 5'-methyluridine-3'-phosphate
  modified_base 17: mod_base = OTHER; note = 5'-methyluridine-3'-phosphate
ctatatctctaaaatttacaccc

SEQ ID NO: 591 - RNA, 23 nt, synthetic construct
  source 1..23: mol_type = other RNA
  modified_base 7: mod_base = OTHER; note = 5'-methyluridine-3'-phosphate
  modified_base 16: mod_base = OTHER; note = 5'-methyluridine-3'-phosphate
  modified_base 22: mod_base = OTHER; note = 5'-methyluridine-3'-phosphate
acccactgaaacaaataaagctg

SEQ ID NO: 592 - RNA, 23 nt, synthetic construct
  source 1..23: mol_type = other RNA
  modified_base 4: mod_base = OTHER; note = 5'-methyluridine-3'-phosphate
  modified_base 11: mod_base = OTHER; note = 5'-methyluridine-3'-phosphate
  modified_base 13: mod_base = OTHER; note = 5'-methyluridine-3'-phosphate
  modified_base 14: mod_base = OTHER; note = 5'-methyluridine-3'-phosphate
  modified_base 16: mod_base = OTHER; note = 5'-methyluridine-3'-phosphate
agctgaacaatgttgtgaggaaa

SEQ ID NO: 593 - RNA, 23 nt, synthetic construct
  source 1..23: mol_type = other RNA
  modified_base 1: mod_base = OTHER; note = 5'-methyluridine-3'-phosphate
  modified_base 2: mod_base = OTHER; note = 5'-methyluridine-3'-phosphate
  modified_base 4: mod_base = OTHER; note = 5'-methyluridine-3'-phosphate
  modified_base 17: mod_base = OTHER; note = 5'-methyluridine-3'-phosphate
  modified_base 20: mod_base = OTHER; note = 5'-methyluridine-3'-phosphate
ttgtgaggaaacagcctcctcaa

SEQ ID NO: 594 - RNA, 23 nt, synthetic construct
  source 1..23: mol_type = other RNA
  modified_base 5: mod_base = OTHER; note = 5'-methyluridine-3'-phosphate
  modified_base 8: mod_base = OTHER; note = 5'-methyluridine-3'-phosphate
  modified_base 12: mod_base = OTHER; note = 5'-methyluridine-3'-phosphate
  modified_base 13: mod_base = OTHER; note = 5'-methyluridine-3'-phosphate
  modified_base 14: mod_base = OTHER; note = 5'-methyluridine-3'-phosphate
  modified_base 16: mod_base = OTHER; note = 5'-methyluridine-3'-phosphate
  modified_base 17: mod_base = OTHER; note = 5'-methyluridine-3'-phosphate
  modified_base 18: mod_base = OTHER; note = 5'-methyluridine-3'-phosphate
  modified_base 22: mod_base = OTHER; note = 5'-methyluridine-3'-phosphate
agcctcctcaatttctttacatg

SEQ ID NO: 595 - RNA, 23 nt, synthetic construct
  source 1..23: mol_type = other RNA
  modified_base 1: mod_base = OTHER; note = 5'-methyluridine-3'-phosphate
  modified_base 10: mod_base = OTHER; note = 5'-methyluridine-3'-phosphate
  modified_base 13: mod_base = OTHER; note = 5'-methyluridine-3'-phosphate
  modified_base 14: mod_base = OTHER; note = 5'-methyluridine-3'-phosphate
  modified_base 15: mod_base = OTHER; note = 5'-methyluridine-3'-phosphate
  modified_base 16: mod_base = OTHER; note = 5'-methyluridine-3'-phosphate
  modified_base 20: mod_base = OTHER; note = 5'-methyluridine-3'-phosphate
  modified_base 21: mod_base = OTHER; note = 5'-methyluridine-3'-phosphate
  modified_base 22: mod_base = OTHER; note = 5'-methyluridine-3'-phosphate
  modified_base 23: mod_base = OTHER; note = 5'-methyluridine
tggcaagggtagttttcggtttt

SEQ ID NO: 596 - RNA, 23 nt, synthetic construct
  source 1..23: mol_type = other RNA
  modified_base 1: mod_base = OTHER; note = 5'-methyluridine-3'-phosphate
  modified_base 2: mod_base = OTHER; note = 5'-methyluridine-3'-phosphate
  modified_base 3: mod_base = OTHER; note = 5'-methyluridine-3'-phosphate
  modified_base 4: mod_base = OTHER; note = 5'-methyluridine-3'-phosphate
  modified_base 8: mod_base = OTHER; note = 5'-methyluridine-3'-phosphate
  modified_base 9: mod_base = OTHER; note = 5'-methyluridine-3'-phosphate
  modified_base 10: mod_base = OTHER; note = 5'-methyluridine-3'-phosphate
  modified_base 11: mod_base = OTHER; note = 5'-methyluridine-3'-phosphate
  modified_base 14: mod_base = OTHER; note = 5'-methyluridine-3'-phosphate
  modified_base 16: mod_base = OTHER; note = 5'-methyluridine-3'-phosphate
  modified_base 17: mod_base = OTHER; note = 5'-methyluridine-3'-phosphate
ttttcggttttcatattccaaaa

SEQ ID NO: 597 - RNA, 23 nt, synthetic construct
  source 1..23: mol_type = other RNA
  modified_base 6: mod_base = OTHER; note = 5'-methyluridine-3'-phosphate
  modified_base 8: mod_base = OTHER; note = 5'-methyluridine-3'-phosphate
  modified_base 9: mod_base = OTHER; note = 5'-methyluridine-3'-phosphate
  modified_base 10: mod_base = OTHER; note = 5'-methyluridine-3'-phosphate
  modified_base 11: mod_base = OTHER; note = 5'-methyluridine-3'-phosphate
  modified_base 12: mod_base = OTHER; note = 5'-methyluridine-3'-phosphate
  modified_base 14: mod_base = OTHER; note = 5'-methyluridine-3'-phosphate
  modified_base 17: mod_base = OTHER; note = 5'-methyluridine-3'-phosphate
  modified_base 19: mod_base = OTHER; note = 5'-methyluridine-3'-phosphate
  modified_base 20: mod_base = OTHER; note = 5'-methyluridine-3'-phosphate
  modified_base 22: mod_base = OTHER; note = 5'-methyluridine-3'-phosphate
  modified_base 23: mod_base = OTHER; note = 5'-methyluridine
ccaactatttttgtcatattctt

SEQ ID NO: 598 - RNA, 23 nt, synthetic construct
  source 1..23: mol_type = other RNA
  modified_base 1: mod_base = OTHER; note = 5'-methyluridine-3'-phosphate
  modified_base 4: mod_base = OTHER; note = 5'-methyluridine-3'-phosphate
  modified_base 6: mod_base = OTHER; note = 5'-methyluridine-3'-phosphate
  modified_base 7: mod_base = OTHER; note = 5'-methyluridine-3'-phosphate
  modified_base 9: mod_base = OTHER; note = 5'-methyluridine-3'-phosphate
  modified_base 10: mod_base = OTHER; note = 5'-methyluridine-3'-phosphate
tcatattcttcaaagaaggaaaa

SEQ ID NO: 599 - RNA, 23 nt, synthetic construct
  source 1..23: mol_type = other RNA
  modified_base 4: mod_base = OTHER; note = 5'-methyluridine-3'-phosphate
  modified_base 6: mod_base = OTHER; note = 5'-methyluridine-3'-phosphate
  modified_base 7: mod_base = OTHER; note = 5'-methyluridine-3'-phosphate
  modified_base 8: mod_base = OTHER; note = 5'-methyluridine-3'-phosphate
  modified_base 10: mod_base = OTHER; note = 5'-methyluridine-3'-phosphate
  modified_base 14: mod_base = OTHER; note = 5'-methyluridine-3'-phosphate
  modified_base 16: mod_base = OTHER; note = 5'-methyluridine-3'-phosphate
aaatgtttctgcatgtgaaagga

SEQ ID NO: 600 - RNA, 23 nt, synthetic construct
  source 1..23: mol_type = other RNA
  modified_base 1: mod_base = OTHER; note = 5'-methyluridine-3'-phosphate
  modified_base 3: mod_base = OTHER; note = 5'-methyluridine-3'-phosphate
  modified_base 15: mod_base = OTHER; note = 5'-methyluridine-3'-phosphate
  modified_base 16: mod_base = OTHER; note = 5'-methyluridine-3'-phosphate
  modified_base 19: mod_base = OTHER; note = 5'-methyluridine-3'-phosphate
  modified_base 21: mod_base = OTHER; note = 5'-methyluridine-3'-phosphate
tgtgaaaggagaaattcatctgg

SEQ ID NO: 601 - RNA, 23 nt, synthetic construct
  source 1..23: mol_type = other RNA
  modified_base 3: mod_base = OTHER; note = 5'-methyluridine-3'-phosphate
  modified_base 5: mod_base = OTHER; note = 5'-methyluridine-3'-phosphate
  modified_base 13: mod_base = OTHER; note = 5'-methyluridine-3'-phosphate
  modified_base 14: mod_base = OTHER; note = 5'-methyluridine-3'-phosphate
  modified_base 15: mod_base = OTHER; note = 5'-methyluridine-3'-phosphate
  modified_base 17: mod_base = OTHER; note = 5'-methyluridine-3'-phosphate
  modified_base 20: mod_base = OTHER; note = 5'-methyluridine-3'-phosphate
catctgggaagatttgtaatgag

SEQ ID NO: 602 - RNA, 23 nt, synthetic construct
  source 1..23: mol_type = other RNA
  modified_base 1: mod_base = OTHER; note = 5'-methyluridine-3'-phosphate
  modified_base 2: mod_base = OTHER; note = 5'-methyluridine-3'-phosphate
  modified_base 3: mod_base = OTHER; note = 5'-methyluridine-3'-phosphate
  modified_base 5: mod_base = OTHER; note = 5'-methyluridine-3'-phosphate
  modified_base 8: mod_base = OTHER; note = 5'-methyluridine-3'-phosphate
  modified_base 15: mod_base = OTHER; note = 5'-methyluridine-3'-phosphate
  modified_base 21: mod_base = OTHER; note = 5'-methyluridine-3'-phosphate
  modified_base 23: mod_base = OTHER; note = 5'-methyluridine
tttgtaatgagaaatcgcgatgt

SEQ ID NO: 603 - RNA, 23 nt, synthetic construct
  source 1..23: mol_type = other RNA
  modified_base 3: mod_base = OTHER; note = 5'-methyluridine-3'-phosphate
  modified_base 9: mod_base = OTHER; note = 5'-methyluridine-3'-phosphate
  modified_base 11: mod_base = OTHER; note = 5'-methyluridine-3'-phosphate
  modified_base 12: mod_base = OTHER; note = 5'-methyluridine-3'-phosphate
  modified_base 14: mod_base = OTHER; note = 5'-methyluridine-3'-phosphate
  modified_base 17: mod_base = OTHER; note = 5'-methyluridine-3'-phosphate
aatcgcgatgttgtgctcacaac

SEQ ID NO: 604 - RNA, 23 nt, synthetic construct
  source 1..23: mol_type = other RNA
  modified_base 3: mod_base = OTHER; note = 5'-methyluridine-3'-phosphate
  modified_base 13: mod_base = OTHER; note = 5'-methyluridine-3'-phosphate
  modified_base 14: mod_base = OTHER; note = 5'-methyluridine-3'-phosphate
  modified_base 15: mod_base = OTHER; note = 5'-methyluridine-3'-phosphate
  modified_base 16: mod_base = OTHER; note = 5'-methyluridine-3'-phosphate
  modified_base 18: mod_base = OTHER; note = 5'-methyluridine-3'-phosphate
  modified_base 22: mod_base = OTHER; note = 5'-methyluridine-3'-phosphate
gctcacaacaacttttgtggatg

SEQ ID NO: 605 - RNA, 23 nt, synthetic construct
  source 1..23: mol_type = other RNA
  modified_base 1: mod_base = OTHER; note = 5'-methyluridine-3'-phosphate
  modified_base 2: mod_base = OTHER; note = 5'-methyluridine-3'-phosphate
  modified_base 4: mod_base = OTHER; note = 5'-methyluridine-3'-phosphate
  modified_base 8: mod_base = OTHER; note = 5'-methyluridine-3'-phosphate
  modified_base 11: mod_base = OTHER; note = 5'-methyluridine-3'-phosphate
  modified_base 13: mod_base = OTHER; note = 5'-methyluridine-3'-phosphate
  modified_base 20: mod_base = OTHER; note = 5'-methyluridine-3'-phosphate
  modified_base 21: mod_base = OTHER; note = 5'-methyluridine-3'-phosphate
  modified_base 22: mod_base = OTHER; note = 5'-methyluridine-3'-phosphate
ttgtggatgatataaaagctttg

SEQ ID NO: 606 - RNA, 23 nt, synthetic construct
  source 1..23: mol_type = other RNA
  modified_base 7: mod_base = OTHER; note = 5'-methyluridine-3'-phosphate
  modified_base 8: mod_base = OTHER; note = 5'-methyluridine-3'-phosphate
  modified_base 9: mod_base = OTHER; note = 5'-methyluridine-3'-phosphate
  modified_base 16: mod_base = OTHER; note = 5'-methyluridine-3'-phosphate
  modified_base 20: mod_base = OTHER; note = 5'-methyluridine-3'-phosphate
  modified_base 22: mod_base = OTHER; note = 5'-methyluridine-3'-phosphate
aaaagctttgccaactacctatg

SEQ ID NO: 607 - RNA, 23 nt, synthetic construct
  source 1..23: mol_type = other RNA
  modified_base 3: mod_base = OTHER; note = 5'-methyluridine-3'-phosphate
  modified_base 7: mod_base = OTHER; note = 5'-methyluridine-3'-phosphate
  modified_base 9: mod_base = OTHER; note = 5'-methyluridine-3'-phosphate
  modified_base 22: mod_base = OTHER; note = 5'-methyluridine-3'-phosphate
actacctatgaaaagggagaata

SEQ ID NO: 608 - RNA, 23 nt, synthetic construct
  source 1..23: mol_type = other RNA
  modified_base 1: mod_base = OTHER; note = 5'-methyluridine-3'-phosphate
  modified_base 2: mod_base = OTHER; note = 5'-methyluridine-3'-phosphate
  modified_base 3: mod_base = OTHER; note = 5'-methyluridine-3'-phosphate
  modified_base 4: mod_base = OTHER; note = 5'-methyluridine-3'-phosphate
  modified_base 8: mod_base = OTHER; note = 5'-methyluridine-3'-phosphate
  modified_base 9: mod_base = OTHER; note = 5'-methyluridine-3'-phosphate
  modified_base 10: mod_base = OTHER; note = 5'-methyluridine-3'-phosphate
  modified_base 11: mod_base = OTHER; note = 5'-methyluridine-3'-phosphate
  modified_base 12: mod_base = OTHER; note = 5'-methyluridine-3'-phosphate
  modified_base 20: mod_base = OTHER; note = 5'-methyluridine-3'-phosphate
  modified_base 22: mod_base = OTHER; note = 5'-methyluridine-3'-phosphate
ttttgcctttttggaaacctatg

SEQ ID NO: 609 - RNA, 23 nt, synthetic construct
  source 1..23: mol_type = other RNA
  modified_base 5: mod_base = OTHER; note = 5'-methyluridine-3'-phosphate
  modified_base 7: mod_base = OTHER; note = 5'-methyluridine-3'-phosphate
  modified_base 13: mod_base = OTHER; note = 5'-methyluridine-3'-phosphate
  modified_base 17: mod_base = OTHER; note = 5'-methyluridine-3'-phosphate
  modified_base 22: mod_base = OTHER; note = 5'-methyluridine-3'-phosphate
aacctatggaactcactacagta

SEQ ID NO: 610 - RNA, 23 nt, synthetic construct
  source 1..23: mol_type = other RNA
  modified_base 1: mod_base = OTHER; note = 5'-methyluridine-3'-phosphate
  modified_base 5: mod_base = OTHER; note = 5'-methyluridine-3'-phosphate
  modified_base 10: mod_base = OTHER; note = 5'-methyluridine-3'-phosphate
  modified_base 14: mod_base = OTHER; note = 5'-methyluridine-3'-phosphate
  modified_base 16: mod_base = OTHER; note = 5'-methyluridine-3'-phosphate
  modified_base 20: mod_base = OTHER; note = 5'-methyluridine-3'-phosphate
  modified_base 22: mod_base = OTHER; note = 5'-methyluridine-3'-phosphate
tcactacagtagctctgggtctc

SEQ ID NO: 611 - RNA, 23 nt, synthetic construct
  source 1..23: mol_type = other RNA
  modified_base 2: mod_base = OTHER; note = 5'-methyluridine-3'-phosphate
  modified_base 4: mod_base = OTHER; note = 5'-methyluridine-3'-phosphate
  modified_base 8: mod_base = OTHER; note = 5'-methyluridine-3'-phosphate
  modified_base 10: mod_base = OTHER; note = 5'-methyluridine-3'-phosphate
  modified_base 12: mod_base = OTHER; note = 5'-methyluridine-3'-phosphate
  modified_base 21: mod_base = OTHER; note = 5'-methyluridine-3'-phosphate
  modified_base 23: mod_base = OTHER; note = 5'-methyluridine
ctctgggtctctaggaggactct

SEQ ID NO: 612 - RNA, 23 nt, synthetic construct
  source 1..23: mol_type = other RNA
  modified_base 4: mod_base = OTHER; note = 5'-methyluridine-3'-phosphate
  modified_base 6: mod_base = OTHER; note = 5'-methyluridine-3'-phosphate
  modified_base 8: mod_base = OTHER; note = 5'-methyluridine-3'-phosphate
  modified_base 13: mod_base = OTHER; note = 5'-methyluridine-3'-phosphate
  modified_base 16: mod_base = OTHER; note = 5'-methyluridine-3'-phosphate
  modified_base 18: mod_base = OTHER; note = 5'-methyluridine-3'-phosphate
  modified_base 20: mod_base = OTHER; note = 5'-methyluridine-3'-phosphate
  modified_base 22: mod_base = OTHER; note = 5'-methyluridine-3'-phosphate
  modified_base 23: mod_base = OTHER; note = 5'-methyluridine
gactctatgaactaatatatgtt

SEQ ID NO: 613 - RNA, 23 nt, synthetic construct
  source 1..23: mol_type = other RNA
  modified_base 1: mod_base = OTHER; note = 5'-methyluridine-3'-phosphate
  modified_base 2: mod_base = OTHER; note = 5'-methyluridine-3'-phosphate
  modified_base 3: mod_base = OTHER; note = 5'-methyluridine-3'-phosphate
  modified_base 7: mod_base = OTHER; note = 5'-methyluridine-3'-phosphate
  modified_base 13: mod_base = OTHER; note = 5'-methyluridine-3'-phosphate
  modified_base 14: mod_base = OTHER; note = 5'-methyluridine-3'-phosphate
  modified_base 18: mod_base = OTHER; note = 5'-methyluridine-3'-phosphate
tttggataaagcttccatgaagc

SEQ ID NO: 614 - RNA, 23 nt, synthetic construct
  source 1..23: mol_type = other RNA
  modified_base 1: mod_base = OTHER; note = 5'-methyluridine-3'-phosphate
  modified_base 14: mod_base = OTHER; note = 5'-methyluridine-3'-phosphate
  modified_base 16: mod_base = OTHER; note = 5'-methyluridine-3'-phosphate
  modified_base 17: mod_base = OTHER; note = 5'-methyluridine-3'-phosphate
  modified_base 22: mod_base = OTHER; note = 5'-methyluridine-3'-phosphate
tgaagcggaaaggtgttgaacta

SEQ ID NO: 615 - RNA, 23 nt, synthetic construct
  source 1..23: mol_type = other RNA
  modified_base 2: mod_base = OTHER; note = 5'-methyluridine-3'-phosphate
  modified_base 4: mod_base = OTHER; note = 5'-methyluridine-3'-phosphate
  modified_base 5: mod_base = OTHER; note = 5'-methyluridine-3'-phosphate
  modified_base 10: mod_base = OTHER; note = 5'-methyluridine-3'-phosphate
  modified_base 19: mod_base = OTHER; note = 5'-methyluridine-3'-phosphate
gtgttgaactaaaagacataaag

SEQ ID NO: 616 - RNA, 23 nt, synthetic construct
  source 1..23: mol_type = other RNA
  modified_base 3: mod_base = OTHER; note = 5'-methyluridine-3'-phosphate
  modified_base 11: mod_base = OTHER; note = 5'-methyluridine-3'-phosphate
  modified_base 15: mod_base = OTHER; note = 5'-methyluridine-3'-phosphate
  modified_base 16: mod_base = OTHER; note = 5'-methyluridine-3'-phosphate
  modified_base 20: mod_base = OTHER; note = 5'-methyluridine-3'-phosphate
  modified_base 22: mod_base = OTHER; note = 5'-methyluridine-3'-phosphate
cataaagagatgccttgggtatc

SEQ ID NO: 617 - RNA, 23 nt, synthetic construct
  source 1..23: mol_type = other RNA
  modified_base 3: mod_base = OTHER; note = 5'-methyluridine-3'-phosphate
  modified_base 5: mod_base = OTHER; note = 5'-methyluridine-3'-phosphate
  modified_base 8: mod_base = OTHER; note = 5'-methyluridine-3'-phosphate
  modified_base 10: mod_base = OTHER; note = 5'-methyluridine-3'-phosphate
  modified_base 14: mod_base = OTHER; note = 5'-methyluridine-3'-phosphate
  modified_base 16: mod_base = OTHER; note = 5'-methyluridine-3'-phosphate
  modified_base 18: mod_base = OTHER; note = 5'-methyluridine-3'-phosphate
  modified_base 20: mod_base = OTHER; note = 5'-methyluridine-3'-phosphate
  modified_base 22: mod_base = OTHER; note = 5'-methyluridine-3'-phosphate
ggtatcatctggatgtatctctg

SEQ ID NO: 618 - RNA, 23 nt, synthetic construct
  source 1..23: mol_type = other RNA
  modified_base 1: mod_base = OTHER; note = 5'-methyluridine-3'-phosphate
  modified_base 3: mod_base = OTHER; note = 5'-methyluridine-3'-phosphate
  modified_base 5: mod_base = OTHER; note = 5'-methyluridine-3'-phosphate
  modified_base 7: mod_base = OTHER; note = 5'-methyluridine-3'-phosphate
  modified_base 9: mod_base = OTHER; note = 5'-methyluridine-3'-phosphate
  modified_base 13: mod_base = OTHER; note = 5'-methyluridine-3'-phosphate
  modified_base 14: mod_base = OTHER; note = 5'-methyluridine-3'-phosphate
  modified_base 15: mod_base = OTHER; note = 5'-methyluridine-3'-phosphate
  modified_base 17: mod_base = OTHER; note = 5'-methyluridine-3'-phosphate
  modified_base 19: mod_base = OTHER; note = 5'-methyluridine-3'-phosphate
tgtatctctggctttctctgaaa

SEQ ID NO: 619 - RNA, 23 nt, synthetic construct
  source 1..23: mol_type = other RNA
  modified_base 1: mod_base = OTHER; note = 5'-methyluridine-3'-phosphate
  modified_base 2: mod_base = OTHER; note = 5'-methyluridine-3'-phosphate
  modified_base 3: mod_base = OTHER; note = 5'-methyluridine-3'-phosphate
  modified_base 5: mod_base = OTHER; note = 5'-methyluridine-3'-phosphate
  modified_base 7: mod_base = OTHER; note = 5'-methyluridine-3'-phosphate
  modified_base 12: mod_base = OTHER; note = 5'-methyluridine-3'-phosphate
  modified_base 14: mod_base = OTHER; note = 5'-methyluridine-3'-phosphate
  modified_base 16: mod_base = OTHER; note = 5'-methyluridine-3'-phosphate
  modified_base 18: mod_base = OTHER; note = 5'-methyluridine-3'-phosphate
  modified_base 19: mod_base = OTHER; note = 5'-methyluridine-3'-phosphate
tttctctgaaatctctgttggag

SEQ ID NO: 620 - RNA, 23 nt, synthetic construct
  source 1..23: mol_type = other RNA
  modified_base 1: mod_base = OTHER; note = 5'-methyluridine-3'-phosphate
  modified_base 2: mod_base = OTHER; note = 5'-methyluridine-3'-phosphate
  modified_base 8: mod_base = OTHER; note = 5'-methyluridine-3'-phosphate
  modified_base 12: mod_base = OTHER; note = 5'-methyluridine-3'-phosphate
  modified_base 13: mod_base = OTHER; note = 5'-methyluridine-3'-phosphate
  modified_base 14: mod_base = OTHER; note = 5'-methyluridine-3'-phosphate
  modified_base 17: mod_base = OTHER; note = 5'-methyluridine-3'-phosphate
  modified_base 23: mod_base = OTHER; note = 5'-methyluridine
ttggagctgaatttaataaagat

SEQ ID NO: 621 - RNA, 23 nt, synthetic construct
  source 1..23: mol_type = other RNA
  modified_base 1: mod_base = OTHER; note = 5'-methyluridine-3'-phosphate
  modified_base 7: mod_base = OTHER; note = 5'-methyluridine-3'-phosphate
  modified_base 10: mod_base = OTHER; note = 5'-methyluridine-3'-phosphate
  modified_base 11: mod_base = OTHER; note = 5'-methyluridine-3'-phosphate
  modified_base 13: mod_base = OTHER; note = 5'-methyluridine-3'-phosphate
  modified_base 15: mod_base = OTHER; note = 5'-methyluridine-3'-phosphate
taaagatgattgtgtaaagaggg

SEQ ID NO: 622 - RNA, 23 nt, synthetic construct
  source 1..23: mol_type = other RNA
  modified_base 6: mod_base = OTHER; note = 5'-methyluridine-3'-phosphate
  modified_base 12: mod_base = OTHER; note = 5'-methyluridine-3'-phosphate
  modified_base 14: mod_base = OTHER; note = 5'-methyluridine-3'-phosphate
  modified_base 20: mod_base = OTHER; note = 5'-methyluridine-3'-phosphate
gagggtagagctgtaaacatcac

SEQ ID NO: 623 - RNA, 23 nt, synthetic construct
  source 1..23: mol_type = other RNA
  modified_base 6: mod_base = OTHER; note = 5'-methyluridine-3'-phosphate
  modified_base 13: mod_base = OTHER; note = 5'-methyluridine-3'-phosphate
  modified_base 21: mod_base = OTHER; note = 5'-methyluridine-3'-phosphate
aaacatcaccagtgaaaacctca

SEQ ID NO: 624 - RNA, 23 nt, synthetic construct
  source 1..23: mol_type = other RNA
  modified_base 4: mod_base = OTHER; note = 5'-methyluridine-3'-phosphate
  modified_base 7: mod_base = OTHER; note = 5'-methyluridine-3'-phosphate
  modified_base 11: mod_base = OTHER; note = 5'-methyluridine-3'-phosphate
  modified_base 14: mod_base = OTHER; note = 5'-methyluridine-3'-phosphate
  modified_base 16: mod_base = OTHER; note = 5'-methyluridine-3'-phosphate
  modified_base 17: mod_base = OTHER; note = 5'-methyluridine-3'-phosphate
  modified_base 19: mod_base = OTHER; note = 5'-methyluridine-3'-phosphate
  modified_base 20: mod_base = OTHER; note = 5'-methyluridine-3'-phosphate
  modified_base 21: mod_base = OTHER; note = 5'-methyluridine-3'-phosphate
acctcatagatgatgttgtttca

SEQ ID NO: 625 - RNA, 23 nt, synthetic construct
  source 1..23: mol_type = other RNA
  modified_base 1: mod_base = OTHER; note = 5'-methyluridine-3'-phosphate
  modified_base 3: mod_base = OTHER; note = 5'-methyluridine-3'-phosphate
  modified_base 4: mod_base = OTHER; note = 5'-methyluridine-3'-phosphate
  modified_base 6: mod_base = OTHER; note = 5'-methyluridine-3'-phosphate
  modified_base 7: mod_base = OTHER; note = 5'-methyluridine-3'-phosphate
  modified_base 8: mod_base = OTHER; note = 5'-methyluridine-3'-phosphate
  modified_base 12: mod_base = OTHER; note = 5'-methyluridine-3'-phosphate
  modified_base 15: mod_base = OTHER; note = 5'-methyluridine-3'-phosphate
  modified_base 22: mod_base = OTHER; note = 5'-methyluridine-3'-phosphate
tgttgtttcactcataagaggtg

SEQ ID NO: 626 - RNA, 23 nt, synthetic construct
  source 1..23: mol_type = other RNA
  modified_base 1: mod_base = OTHER; note = 5'-methyluridine-3'-phosphate
  modified_base 14: mod_base = OTHER; note = 5'-methyluridine-3'-phosphate
  modified_base 16: mod_base = OTHER; note = 5'-methyluridine-3'-phosphate
  modified_base 20: mod_base = OTHER; note = 5'-methyluridine-3'-phosphate
  modified_base 21: mod_base = OTHER; note = 5'-methyluridine-3'-phosphate
  modified_base 22: mod_base = OTHER; note = 5'-methyluridine-3'-phosphate
tggaaccagaaaatatgcatttg

SEQ ID NO: 627 - RNA, 23 nt, synthetic construct
  source 1..23: mol_type = other RNA
  modified_base 1: mod_base = OTHER; note = 5'-methyluridine-3'-phosphate
  modified_base 2: mod_base = OTHER; note = 5'-methyluridine-3'-phosphate
  modified_base 7: mod_base = OTHER; note = 5'-methyluridine-3'-phosphate
  modified_base 19: mod_base = OTHER; note = 5'-methyluridine-3'-phosphate
  modified_base 20: mod_base = OTHER; note = 5'-methyluridine-3'-phosphate
  modified_base 22: mod_base = OTHER; note = 5'-methyluridine-3'-phosphate
ttgaactgaaagaaaagcttctc

SEQ ID NO: 628 - RNA, 23 nt, synthetic construct
  source 1..23: mol_type = other RNA
  modified_base 1: mod_base = OTHER; note = 5'-methyluridine-3'-phosphate
  modified_base 13: mod_base = OTHER; note = 5'-methyluridine-3'-phosphate
  modified_base 16: mod_base = OTHER; note = 5'-methyluridine-3'-phosphate
  modified_base 17: mod_base = OTHER; note = 5'-methyluridine-3'-phosphate
  modified_base 20: mod_base = OTHER; note = 5'-methyluridine-3'-phosphate
  modified_base 22: mod_base = OTHER; note = 5'-methyluridine-3'-phosphate
tccgaggaaccgtgattgatgtg

SEQ ID NO: 629 - RNA, 23 nt, synthetic construct
  source 1..23: mol_type = other RNA
  modified_base 2: mod_base = OTHER; note = 5'-methyluridine-3'-phosphate
  modified_base 3: mod_base = OTHER; note = 5'-methyluridine-3'-phosphate
  modified_base 6: mod_base = OTHER; note = 5'-methyluridine-3'-phosphate
  modified_base 8: mod_base = OTHER; note = 5'-methyluridine-3'-phosphate
  modified_base 12: mod_base = OTHER; note = 5'-methyluridine-3'-phosphate
  modified_base 16: mod_base = OTHER; note = 5'-methyluridine-3'-phosphate
  modified_base 17: mod_base = OTHER; note = 5'-methyluridine-3'-phosphate
  modified_base 18: mod_base = OTHER; note = 5'-methyluridine-3'-phosphate
  modified_base 20: mod_base = OTHER; note = 5'-methyluridine-3'-phosphate
attgatgtgactgactttgtcaa

SEQ ID NO: 630 - RNA, 23 nt, synthetic construct
  source 1..23: mol_type = other RNA
  modified_base 2: mod_base = OTHER; note = 5'-methyluridine-3'-phosphate
  modified_base 4: mod_base = OTHER; note = 5'-methyluridine-3'-phosphate
  modified_base 5: mod_base = OTHER; note = 5'-methyluridine-3'-phosphate
  modified_base 9: mod_base = OTHER; note = 5'-methyluridine-3'-phosphate
  modified_base 13: mod_base = OTHER; note = 5'-methyluridine-3'-phosphate
  modified_base 16: mod_base = OTHER; note = 5'-methyluridine-3'-phosphate
  modified_base 19: mod_base = OTHER; note = 5'-methyluridine-3'-phosphate
  modified_base 22: mod_base = OTHER; note = 5'-methyluridine-3'-phosphate
ctcttccataaatgatgctcctg

SEQ ID NO: 631 - RNA, 23 nt, synthetic construct
  source 1..23: mol_type = other RNA
  modified_base 1: mod_base = OTHER; note = 5'-methyluridine-3'-phosphate
  modified_base 4: mod_base = OTHER; note = 5'-methyluridine-3'-phosphate
  modified_base 7: mod_base = OTHER; note = 5'-methyluridine-3'-phosphate
  modified_base 9: mod_base = OTHER; note = 5'-methyluridine-3'-phosphate
  modified_base 10: mod_base = OTHER; note = 5'-methyluridine-3'-phosphate
  modified_base 12: mod_base = OTHER; note = 5'-methyluridine-3'-phosphate
  modified_base 15: mod_base = OTHER; note = 5'-methyluridine-3'-phosphate
  modified_base 16: mod_base = OTHER; note = 5'-methyluridine-3'-phosphate
  modified_base 19: mod_base = OTHER; note = 5'-methyluridine-3'-phosphate
tgctcctgttctcattagtcaaa

SEQ ID NO: 632 - RNA, 23 nt, synthetic construct
  source 1..23: mol_type = other RNA
  modified_base 1: mod_base = OTHER; note = 5'-methyluridine-3'-phosphate
  modified_base 4: mod_base = OTHER; note = 5'-methyluridine-3'-phosphate
  modified_base 6: mod_base = OTHER; note = 5'-methyluridine-3'-phosphate
  modified_base 8: mod_base = OTHER; note = 5'-methyluridine-3'-phosphate
  modified_base 10: mod_base = OTHER; note = 5'-methyluridine-3'-phosphate
  modified_base 13: mod_base = OTHER; note = 5'-methyluridine-3'-phosphate
  modified_base 15: mod_base = OTHER; note = 5'-methyluridine-3'-phosphate
  modified_base 18: mod_base = OTHER; note = 5'-methyluridine-3'-phosphate
  modified_base 19: mod_base = OTHER; note = 5'-methyluridine-3'-phosphate
tcctatatataatctggttccag

SEQ ID NO: 633 - RNA, 23 nt, synthetic construct
  source 1..23: mol_type = other RNA
  modified_base 1: mod_base = OTHER; note = 5'-methyluridine-3'-phosphate
  modified_base 3: mod_base = OTHER; note = 5'-methyluridine-3'-phosphate
  modified_base 6: mod_base = OTHER; note = 5'-methyluridine-3'-phosphate
  modified_base 7: mod_base = OTHER; note = 5'-methyluridine-3'-phosphate
  modified_base 12: mod_base = OTHER; note = 5'-methyluridine-3'-phosphate
  modified_base 18: mod_base = OTHER; note = 5'-methyluridine-3'-phosphate
tctggttccagtgaaaatgaaaa

SEQ ID NO: 634 - RNA, 23 nt, synthetic construct
  source 1..23: mol_type = other RNA
  modified_base 8: mod_base = OTHER; note = 5'-methyluridine-3'-phosphate
  modified_base 22: mod_base = OTHER; note = 5'-methyluridine-3'-phosphate
  modified_base 23: mod_base = OTHER; note = 5'-methyluridine
gcacacctaaagaaacaaaactt

SEQ ID NO: 635 - RNA, 23 nt, synthetic construct
  source 1..23: mol_type = other RNA
  modified_base 8: mod_base = OTHER; note = 5'-methyluridine-3'-phosphate
  modified_base 9: mod_base = OTHER; note = 5'-methyluridine-3'-phosphate
  modified_base 21: mod_base = OTHER; note = 5'-methyluridine-3'-phosphate
  modified_base 22: mod_base = OTHER; note = 5'-methyluridine-3'-phosphate
acaaaacttggaaagagccattg

SEQ ID NO: 636 - RNA, 23 nt, synthetic construct
  source 1..23: mol_type = other RNA
  modified_base 7: mod_base = OTHER; note = 5'-methyluridine-3'-phosphate
  modified_base 8: mod_base = OTHER; note = 5'-methyluridine-3'-phosphate
  modified_base 15: mod_base = OTHER; note = 5'-methyluridine-3'-phosphate
  modified_base 17: mod_base = OTHER; note = 5'-methyluridine-3'-phosphate
  modified_base 19: mod_base = OTHER; note = 5'-methyluridine-3'-phosphate
  modified_base 23: mod_base = OTHER; note = 5'-methyluridine
gagccattgaagactatatcaat

SEQ ID NO: 637 - RNA, 23 nt, synthetic construct
  source 1..23: mol_type = other RNA
  modified_base 3: mod_base = OTHER; note = 5'-methyluridine-3'-phosphate
  modified_base 5: mod_base = OTHER; note = 5'-methyluridine-3'-phosphate
  modified_base 13: mod_base = OTHER; note = 5'-methyluridine-3'-phosphate
  modified_base 22: mod_base = OTHER; note = 5'-methyluridine-3'-phosphate
agtgtaagaaaatgccacacatg

SEQ ID NO: 638 - RNA, 23 nt, synthetic construct
  source 1..23: mol_type = other RNA
  modified_base 5: mod_base = OTHER; note = 5'-methyluridine-3'-phosphate
  modified_base 13: mod_base = OTHER; note = 5'-methyluridine-3'-phosphate
  modified_base 19: mod_base = OTHER; note = 5'-methyluridine-3'-phosphate
cacatgccaaaatggaggtacag

SEQ ID NO: 639 - RNA, 23 nt, synthetic construct
  source 1..23: mol_type = other RNA
  modified_base 4: mod_base = OTHER; note = 5'-methyluridine-3'-phosphate
  modified_base 7: mod_base = OTHER; note = 5'-methyluridine-3'-phosphate
  modified_base 8: mod_base = OTHER; note = 5'-methyluridine-3'-phosphate
  modified_base 10: mod_base = OTHER; note = 5'-methyluridine-3'-phosphate
  modified_base 13: mod_base = OTHER; note = 5'-methyluridine-3'-phosphate
  modified_base 17: mod_base = OTHER; note = 5'-methyluridine-3'-phosphate
cagtgattctaatggatggaaag

SEQ ID NO: 640 - RNA, 23 nt, synthetic construct
  source 1..23: mol_type = other RNA
  modified_base 1: mod_base = OTHER; note = 5'-methyluridine-3'-phosphate
  modified_base 5: mod_base = OTHER; note = 5'-methyluridine-3'-phosphate
  modified_base 12: mod_base = OTHER; note = 5'-methyluridine-3'-phosphate
  modified_base 14: mod_base = OTHER; note = 5'-methyluridine-3'-phosphate
  modified_base 15: mod_base = OTHER; note = 5'-methyluridine-3'-phosphate
  modified_base 16: mod_base = OTHER; note = 5'-methyluridine-3'-phosphate
  modified_base 18: mod_base = OTHER; note = 5'-methyluridine-3'-phosphate
  modified_base 20: mod_base = OTHER; note = 5'-methyluridine-3'-phosphate
tggatggaaagtgtttgtgtgcc

SEQ ID NO: 641 - RNA, 23 nt, synthetic construct
  source 1..23: mol_type = other RNA
  modified_base 1: mod_base = OTHER; note = 5'-methyluridine-3'-phosphate
  modified_base 2: mod_base = OTHER; note = 5'-methyluridine-3'-phosphate
  modified_base 3: mod_base = OTHER; note = 5'-methyluridine-3'-phosphate
  modified_base 5: mod_base = OTHER; note = 5'-methyluridine-3'-phosphate
  modified_base 7: mod_base = OTHER; note = 5'-methyluridine-3'-phosphate
  modified_base 11: mod_base = OTHER; note = 5'-methyluridine-3'-phosphate
  modified_base 17: mod_base = OTHER; note = 5'-methyluridine-3'-phosphate
  modified_base 18: mod_base = OTHER; note = 5'-methyluridine-3'-phosphate
  modified_base 23: mod_base = OTHER; note = 5'-methyluridine
tttgtgtgcctgcccattcaaat

SEQ ID NO: 642 - RNA, 23 nt, synthetic construct
  source 1..23: mol_type = other RNA
  modified_base 5: mod_base = OTHER; note = 5'-methyluridine-3'-phosphate
  modified_base 6: mod_base = OTHER; note = 5'-methyluridine-3'-phosphate
  modified_base 11: mod_base = OTHER; note = 5'-methyluridine-3'-phosphate
  modified_base 12: mod_base = OTHER; note = 5'-methyluridine-3'-phosphate
  modified_base 13: mod_base = OTHER; note = 5'-methyluridine-3'-phosphate
  modified_base 21: mod_base = OTHER; note = 5'-methyluridine-3'-phosphate
  modified_base 22: mod_base = OTHER; note = 5'-methyluridine-3'-phosphate
cccattcaaatttgagggaattg

SEQ ID NO: 643 - RNA, 23 nt, synthetic construct
  source 1..23: mol_type = other RNA
  modified_base 1: mod_base = OTHER; note = 5'-methyluridine-3'-phosphate
  modified_base 5: mod_base = OTHER; note = 5'-methyluridine-3'-phosphate
  modified_base 7: mod_base = OTHER; note = 5'-methyluridine-3'-phosphate
  modified_base 12: mod_base = OTHER; note = 5'-methyluridine-3'-phosphate
  modified_base 16: mod_base = OTHER; note = 5'-methyluridine-3'-phosphate
tgcctgtgaaatcagtaaacaaa

SEQ ID NO: 644 - RNA, 23 nt, synthetic construct
  source 1..23: mol_type = other RNA
  modified_base 5: mod_base = OTHER; note = 5'-methyluridine-3'-phosphate
  modified_base 6: mod_base = OTHER; note = 5'-methyluridine-3'-phosphate
  modified_base 7: mod_base = OTHER; note = 5'-methyluridine-3'-phosphate
  modified_base 9: mod_base = OTHER; note = 5'-methyluridine-3'-phosphate
  modified_base 16: mod_base = OTHER; note = 5'-methyluridine-3'-phosphate
  modified_base 17: mod_base = OTHER; note = 5'-methyluridine-3'-phosphate
aaaatttctgaaggattgccagc

SEQ ID NO: 645 - RNA, 23 nt, synthetic construct
  source 1..23: mol_type = other RNA
  modified_base 4: mod_base = OTHER; note = 5'-methyluridine-3'-phosphate
  modified_base 10: mod_base = OTHER; note = 5'-methyluridine-3'-phosphate
  modified_base 12: mod_base = OTHER; note = 5'-methyluridine-3'-phosphate
  modified_base 13: mod_base = OTHER; note = 5'-methyluridine-3'-phosphate
  modified_base 17: mod_base = OTHER; note = 5'-methyluridine-3'-phosphate
  modified_base 18: mod_base = OTHER; note = 5'-methyluridine-3'-phosphate
  modified_base 20: mod_base = OTHER; note = 5'-methyluridine-3'-phosphate
  modified_base 22: mod_base = OTHER; note = 5'-methyluridine-3'-phosphate
aaatagagctgttggcttctctg

SEQ ID NO: 646 - RNA, 23 nt, synthetic construct
  source 1..23: mol_type = other RNA
  modified_base 5: mod_base = OTHER; note = 5'-methyluridine-3'-phosphate
  modified_base 21: mod_base = OTHER; note = 5'-methyluridine-3'-phosphate
ccagtggaagaagaaaacactag

SEQ ID NO: 647 - RNA, 23 nt, synthetic construct
  source 1..23: mol_type = other RNA
  modified_base 9: mod_base = OTHER; note = 5'-methyluridine-3'-phosphate
  modified_base 12: mod_base = OTHER; note = 5'-methyluridine-3'-phosphate
  modified_base 16: mod_base = OTHER; note = 5'-methyluridine-3'-phosphate
  modified_base 17: mod_base = OTHER; note = 5'-methyluridine-3'-phosphate
  modified_base 22: mod_base = OTHER; note = 5'-methyluridine-3'-phosphate
gaaaacactagtaccttcagatc

SEQ ID NO: 648 - RNA, 23 nt, synthetic construct
  source 1..23: mol_type = other RNA
  modified_base 4: mod_base = OTHER; note = 5'-methyluridine-3'-phosphate
  modified_base 10: mod_base = OTHER; note = 5'-methyluridine-3'-phosphate
  modified_base 13: mod_base = OTHER; note = 5'-methyluridine-3'-phosphate
  modified_base 15: mod_base = OTHER; note = 5'-methyluridine-3'-phosphate
  modified_base 16: mod_base = OTHER; note = 5'-methyluridine-3'-phosphate
  modified_base 20: mod_base = OTHER; note = 5'-methyluridine-3'-phosphate
ccctgaagataatcttagctgcc

SEQ ID NO: 649 - RNA, 23 nt, synthetic construct
  source 1..23: mol_type = other RNA
  modified_base 4: mod_base = OTHER; note = 5'-methyluridine-3'-phosphate
  modified_base 11: mod_base = OTHER; note = 5'-methyluridine-3'-phosphate
  modified_base 15: mod_base = OTHER; note = 5'-methyluridine-3'-phosphate
  modified_base 23: mod_base = OTHER; note = 5'-methyluridine
agctgccaagtaaatagcaacat

SEQ ID NO: 650 - RNA, 23 nt, synthetic construct
  source 1..23: mol_type = other RNA
  modified_base 3: mod_base = OTHER; note = 5'-methyluridine-3'-phosphate
  modified_base 4: mod_base = OTHER; note = 5'-methyluridine-3'-phosphate
  modified_base 7: mod_base = OTHER; note = 5'-methyluridine-3'-phosphate
  modified_base 13: mod_base = OTHER; note = 5'-methyluridine-3'-phosphate
  modified_base 16: mod_base = OTHER; note = 5'-methyluridine-3'-phosphate
gcttcatgaaaatcctaccaacc

SEQ ID NO: 651 - RNA, 23 nt, synthetic construct
  source 1..23: mol_type = other RNA
  modified_base 3: mod_base = OTHER; note = 5'-methyluridine-3'-phosphate
  modified_base 5: mod_base = OTHER; note = 5'-methyluridine-3'-phosphate
  modified_base 10: mod_base = OTHER; note = 5'-methyluridine-3'-phosphate
  modified_base 12: mod_base = OTHER; note = 5'-methyluridine-3'-phosphate
  modified_base 14: mod_base = OTHER; note = 5'-methyluridine-3'-phosphate
  modified_base 15: mod_base = OTHER; note = 5'-methyluridine-3'-phosphate
  modified_base 17: mod_base = OTHER; note = 5'-methyluridine-3'-phosphate
  modified_base 19: mod_base = OTHER; note = 5'-methyluridine-3'-phosphate
  modified_base 21: mod_base = OTHER; note = 5'-methyluridine-3'-phosphate
  modified_base 22: mod_base = OTHER; note = 5'-methyluridine-3'-phosphate
cctctgaagtctcttctctctta

SEQ ID NO: 652 - RNA, 23 nt, synthetic construct
  source 1..23: mol_type = other RNA
  modified_base 2: mod_base = OTHER; note = 5'-methyluridine-3'-phosphate
  modified_base 3: mod_base = OTHER; note = 5'-methyluridine-3'-phosphate
  modified_base 5: mod_base = OTHER; note = 5'-methyluridine-3'-phosphate
  modified_base 7: mod_base = OTHER; note = 5'-methyluridine-3'-phosphate
  modified_base 9: mod_base = OTHER; note = 5'-methyluridine-3'-phosphate
  modified_base 10: mod_base = OTHER; note = 5'-methyluridine-3'-phosphate
  modified_base 14: mod_base = OTHER; note = 5'-methyluridine-3'-phosphate
  modified_base 16: mod_base = OTHER; note = 5'-methyluridine-3'-phosphate
  modified_base 18: mod_base = OTHER; note = 5'-methyluridine-3'-phosphate
  modified_base 21: mod_base = OTHER; note = 5'-methyluridine-3'-phosphate
  modified_base 22: mod_base = OTHER; note = 5'-methyluridine-3'-phosphate
  modified_base 23: mod_base = OTHER; note = 5'-methyluridine
cttctctcttaggtctataattt

SEQ ID NO: 653 - RNA, 23 nt, synthetic construct
  source 1..23: mol_type = other RNA
  modified_base 1: mod_base = OTHER; note = 5'-methyluridine-3'-phosphate
  modified_base 2: mod_base = OTHER; note = 5'-methyluridine-3'-phosphate
  modified_base 4: mod_base = OTHER; note = 5'-methyluridine-3'-phosphate
  modified_base 5: mod_base = OTHER; note = 5'-methyluridine-3'-phosphate
  modified_base 8: mod_base = OTHER; note = 5'-methyluridine-3'-phosphate
  modified_base 9: mod_base = OTHER; note = 5'-methyluridine-3'-phosphate
  modified_base 14: mod_base = OTHER; note = 5'-methyluridine-3'-phosphate
  modified_base 17: mod_base = OTHER; note = 5'-methyluridine-3'-phosphate
  modified_base 19: mod_base = OTHER; note = 5'-methyluridine-3'-phosphate
  modified_base 22: mod_base = OTHER; note = 5'-methyluridine-3'-phosphate
ttcttccttaaactcctgtgatg

SEQ ID NO: 654 - RNA, 23 nt, synthetic construct
  source 1..23: mol_type = other RNA
  modified_base 1: mod_base = OTHER; note = 5'-methyluridine-3'-phosphate
  modified_base 5: mod_base = OTHER; note = 5'-methyluridine-3'-phosphate
  modified_base 8: mod_base = OTHER; note = 5'-methyluridine-3'-phosphate
  modified_base 15: mod_base = OTHER; note = 5'-methyluridine-3'-phosphate
  modified_base 22: mod_base = OTHER; note = 5'-methyluridine-3'-phosphate
tccctaatgagaagtcaacagtg

SEQ ID NO: 655 - RNA, 23 nt, synthetic construct
  source 1..23: mol_type = other RNA
  modified_base 1: mod_base = OTHER; note = 5'-methyluridine-3'-phosphate
  modified_base 8: mod_base = OTHER; note = 5'-methyluridine-3'-phosphate
  modified_base 13: mod_base = OTHER; note = 5'-methyluridine-3'-phosphate
tcaacagtgaaatacgccagaac

SEQ ID NO: 656 - RNA, 23 nt, synthetic construct
  source 1..23: mol_type = other RNA
  modified_base 1: mod_base = OTHER; note = 5'-methyluridine-3'-phosphate
  modified_base 12: mod_base = OTHER; note = 5'-methyluridine-3'-phosphate
  modified_base 15: mod_base = OTHER; note = 5'-methyluridine-3'-phosphate
  modified_base 16: mod_base = OTHER; note = 5'-methyluridine-3'-phosphate
  modified_base 17: mod_base = OTHER; note = 5'-methyluridine-3'-phosphate
  modified_base 19: mod_base = OTHER; note = 5'-methyluridine-3'-phosphate
tacgccagaactgctttatccca

SEQ ID NO: 657 - RNA, 23 nt, synthetic construct
  source 1..23: mol_type = other RNA
  modified_base 2: mod_base = OTHER; note = 5'-methyluridine-3'-phosphate
  modified_base 3: mod_base = OTHER; note = 5'-methyluridine-3'-phosphate
  modified_base 4: mod_base = OTHER; note = 5'-methyluridine-3'-phosphate
  modified_base 6: mod_base = OTHER; note = 5'-methyluridine-3'-phosphate
  modified_base 18: mod_base = OTHER; note = 5'-methyluridine-3'-phosphate
ctttatcccacggaaaatgccaa

SEQ ID NO: 658 - RNA, 23 nt, synthetic construct
  source 1..23: mol_type = other RNA
  modified_base 6: mod_base = OTHER; note = 5'-methyluridine-3'-phosphate
  modified_base 12: mod_base = OTHER; note = 5'-methyluridine-3'-phosphate
  modified_base 14: mod_base = OTHER; note = 5'-methyluridine-3'-phosphate
  modified_base 16: mod_base = OTHER; note = 5'-methyluridine-3'-phosphate
  modified_base 17: mod_base = OTHER; note = 5'-methyluridine-3'-phosphate
  modified_base 19: mod_base = OTHER; note = 5'-methyluridine-3'-phosphate
gaaaatgccaatctcttctaaaa

SEQ ID NO: 659 - RNA, 23 nt, synthetic construct
  source 1..23: mol_type = other RNA
  modified_base 3: mod_base = OTHER; note = 5'-methyluridine-3'-phosphate
  modified_base 4: mod_base = OTHER; note = 5'-methyluridine-3'-phosphate
  modified_base 10: mod_base = OTHER; note = 5'-methyluridine-3'-phosphate
  modified_base 13: mod_base = OTHER; note = 5'-methyluridine-3'-phosphate
  modified_base 14: mod_base = OTHER; note = 5'-methyluridine-3'-phosphate
  modified_base 15: mod_base = OTHER; note = 5'-methyluridine-3'-phosphate
  modified_base 16: mod_base = OTHER; note = 5'-methyluridine-3'-phosphate
acttcaaagtaattttcaaacgg

SEQ ID NO: 660 - RNA, 23 nt, synthetic construct
  source 1..23: mol_type = other RNA
  modified_base 2: mod_base = OTHER; note = 5'-methyluridine-3'-phosphate
  modified_base 3: mod_base = OTHER; note = 5'-methyluridine-3'-phosphate
  modified_base 4: mod_base = OTHER; note = 5'-methyluridine-3'-phosphate
  modified_base 6: mod_base = OTHER; note = 5'-methyluridine-3'-phosphate
  modified_base 8: mod_base = OTHER; note = 5'-methyluridine-3'-phosphate
  modified_base 11: mod_base = OTHER; note = 5'-methyluridine-3'-phosphate
  modified_base 12: mod_base = OTHER; note = 5'-methyluridine-3'-phosphate
  modified_base 17: mod_base = OTHER; note = 5'-methyluridine-3'-phosphate
  modified_base 19: mod_base = OTHER; note = 5'-methyluridine-3'-phosphate
  modified_base 20: mod_base = OTHER; note = 5'-methyluridine-3'-phosphate
  modified_base 22: mod_base = OTHER; note = 5'-methyluridine-3'-phosphate
ctttgtatggttaacatattctg

SEQ ID NO: 661 - RNA, 23 nt, synthetic construct
  source 1..23: mol_type = other RNA
  modified_base 1: mod_base = OTHER; note = 5'-methyluridine-3'-phosphate
  modified_base 3: mod_base = OTHER; note = 5'-methyluridine-3'-phosphate
  modified_base 10: mod_base = OTHER; note = 5'-methyluridine-3'-phosphate
  modified_base 14: mod_base = OTHER; note = 5'-methyluridine-3'-phosphate
tctgccaggtccatgaccacacg

SEQ ID NO: 662 - RNA, 23 nt, synthetic construct
  source 1..23: mol_type = other RNA
  modified_base 1: mod_base = OTHER; note = 5'-methyluridine-3'-phosphate
  modified_base 11: mod_base = OTHER; note = 5'-methyluridine-3'-phosphate
  modified_base 13: mod_base = OTHER; note = 5'-methyluridine-3'-phosphate
  modified_base 15: mod_base = OTHER; note = 5'-methyluridine-3'-phosphate
  modified_base 20: mod_base = OTHER; note = 5'-methyluridine-3'-phosphate
tgaccacacgtctgtaccatgca

SEQ ID NO: 663 - RNA, 23 nt, synthetic construct
  source 1..23: mol_type = other RNA
  modified_base 1: mod_base = OTHER; note = 5'-methyluridine-3'-phosphate
  modified_base 6: mod_base = OTHER; note = 5'-methyluridine-3'-phosphate
  modified_base 11: mod_base = OTHER; note = 5'-methyluridine-3'-phosphate
  modified_base 12: mod_base = OTHER; note = 5'-methyluridine-3'-phosphate
  modified_base 13: mod_base = OTHER; note = 5'-methyluridine-3'-phosphate
  modified_base 17: mod_base = OTHER; note = 5'-methyluridine-3'-phosphate
  modified_base 19: mod_base = OTHER; note = 5'-methyluridine-3'-phosphate
  modified_base 20: mod_base = OTHER; note = 5'-methyluridine-3'-phosphate
  modified_base 22: mod_base = OTHER; note = 5'-methyluridine-3'-phosphate
  modified_base 23: mod_base = OTHER; note = 5'-methyluridine
taccatgcaatttaactcttatt

SEQ ID NO: 664 - RNA, 23 nt, synthetic construct
  source 1..23: mol_type = other RNA
  modified_base 2: mod_base = OTHER; note = 5'-methyluridine-3'-phosphate
  modified_base 3: mod_base = OTHER; note = 5'-methyluridine-3'-phosphate
  modified_base 4: mod_base = OTHER; note = 5'-methyluridine-3'-phosphate
  modified_base 7: mod_base = OTHER; note = 5'-methyluridine-3'-phosphate
  modified_base 8: mod_base = OTHER; note = 5'-methyluridine-3'-phosphate
  modified_base 10: mod_base = OTHER; note = 5'-methyluridine-3'-phosphate
  modified_base 11: mod_base = OTHER; note = 5'-methyluridine-3'-phosphate
  modified_base 12: mod_base = OTHER; note = 5'-methyluridine-3'-phosphate
  modified_base 15: mod_base = OTHER; note = 5'-methyluridine-3'-phosphate
  modified_base 16: mod_base = OTHER; note = 5'-methyluridine-3'-phosphate
  modified_base 20: mod_base = OTHER; note = 5'-methyluridine-3'-phosphate
  modified_base 22: mod_base = OTHER; note = 5'-methyluridine-3'-phosphate
gtttggttatttgcttaggtgtg

SEQ ID NO: 665 - RNA, 23 nt, synthetic construct
  source 1..23: mol_type = other RNA
  modified_base 1: mod_base = OTHER; note = 5'-methyluridine-3'-phosphate
  modified_base 5: mod_base = OTHER; note = 5'-methyluridine-3'-phosphate
  modified_base 9: mod_base = OTHER; note = 5'-methyluridine-3'-phosphate
  modified_base 10: mod_base = OTHER; note = 5'-methyluridine-3'-phosphate
  modified_base 13: mod_base = OTHER; note = 5'-methyluridine-3'-phosphate
  modified_base 14: mod_base = OTHER; note = 5'-methyluridine-3'-phosphate
  modified_base 22: mod_base = OTHER; note = 5'-methyluridine-3'-phosphate
tgcatacattcattcagcaaatg

SEQ ID NO: 666 - RNA, 23 nt, synthetic construct
  source 1..23: mol_type = other RNA
  modified_base 11: mod_base = OTHER; note = 5'-methyluridine-3'-phosphate
  modified_base 21: mod_base = OTHER; note = 5'-methyluridine-3'-phosphate
  modified_base 22: mod_base = OTHER; note = 5'-methyluridine-3'-phosphate
accagccacgtgcacagcagttg

SEQ ID NO: 667 - RNA, 23 nt, synthetic construct
  source 1..23: mol_type = other RNA
  modified_base 6: mod_base = OTHER; note = 5'-methyluridine-3'-phosphate
  modified_base 7: mod_base = OTHER; note = 5'-methyluridine-3'-phosphate
  modified_base 10: mod_base = OTHER; note = 5'-methyluridine-3'-phosphate
  modified_base 11: mod_base = OTHER; note = 5'-methyluridine-3'-phosphate
  modified_base 12: mod_base = OTHER; note = 5'-methyluridine-3'-phosphate
  modified_base 13: mod_base = OTHER; note = 5'-methyluridine-3'-phosphate
  modified_base 16: mod_base = OTHER; note = 5'-methyluridine-3'-phosphate
  modified_base 19: mod_base = OTHER; note = 5'-methyluridine-3'-phosphate
  modified_base 21: mod_base = OTHER; note = 5'-methyluridine-3'-phosphate
  modified_base 22: mod_base = OTHER; note = 5'-methyluridine-3'-phosphate
agcagttgcttttactagtctta

SEQ ID NO: 668 - RNA, 23 nt, synthetic construct
  source 1..23: mol_type = other RNA
  modified_base 1: mod_base = OTHER; note = 5'-methyluridine-3'-phosphate
  modified_base 4: mod_base = OTHER; note = 5'-methyluridine-3'-phosphate
  modified_base 7: mod_base = OTHER; note = 5'-methyluridine-3'-phosphate
  modified_base 9: mod_base = OTHER; note = 5'-methyluridine-3'-phosphate
  modified_base 10: mod_base = OTHER; note = 5'-methyluridine-3'-phosphate
  modified_base 14: mod_base = OTHER; note = 5'-methyluridine-3'-phosphate
  modified_base 16: mod_base = OTHER; note = 5'-methyluridine-3'-phosphate
  modified_base 21: mod_base = OTHER; note = 5'-methyluridine-3'-phosphate
  modified_base 22: mod_base = OTHER; note = 5'-methyluridine-3'-phosphate
  modified_base 23: mod_base = OTHER; note = 5'-methyluridine
tactagtcttagctctacgattt

SEQ ID NO: 669 - RNA, 23 nt, synthetic construct
  source 1..23: mol_type = other RNA
  modified_base 2: mod_base = OTHER; note = 5'-methyluridine-3'-phosphate
  modified_base 7: mod_base = OTHER; note = 5'-methyluridine-3'-phosphate
  modified_base 8: mod_base = OTHER; note = 5'-methyluridine-3'-phosphate
  modified_base 9: mod_base = OTHER; note = 5'-methyluridine-3'-phosphate
  modified_base 13: mod_base = OTHER; note = 5'-methyluridine-3'-phosphate
  modified_base 17: mod_base = OTHER; note = 5'-methyluridine-3'-phosphate
  modified_base 19: mod_base = OTHER; note = 5'-methyluridine-3'-phosphate
  modified_base 21: mod_base = OTHER; note = 5'-methyluridine-3'-phosphate
ctacgatttaaatccatgtgtcc

SEQ ID NO: 670 - RNA, 23 nt, synthetic construct
  source 1..23: mol_type = other RNA
  modified_base 5: mod_base = OTHER; note = 5'-methyluridine-3'-phosphate
  modified_base 8: mod_base = OTHER; note = 5'-methyluridine-3'-phosphate
  modified_base 11: mod_base = OTHER; note = 5'-methyluridine-3'-phosphate
  modified_base 12: mod_base = OTHER; note = 5'-methyluridine-3'-phosphate
  modified_base 13: mod_base = OTHER; note = 5'-methyluridine-3'-phosphate
aaactactagtttaccagaggac

SEQ ID NO: 671 - RNA, 23 nt, synthetic construct
  source 1..23: mol_type = other RNA
  modified_base 1: mod_base = OTHER; note = 5'-methyluridine-3'-phosphate
  modified_base 11: mod_base = OTHER; note = 5'-methyluridine-3'-phosphate
  modified_base 21: mod_base = OTHER; note = 5'-methyluridine-3'-phosphate
  modified_base 22: mod_base = OTHER; note = 5'-methyluridine-3'-phosphate
tgaagggagataaagaggagttg

SEQ ID NO: 672 - RNA, 23 nt, synthetic construct
  source 1..23: mol_type = other RNA
  modified_base 6: mod_base = OTHER; note = 5'-methyluridine-3'-phosphate
  modified_base 7: mod_base = OTHER; note = 5'-methyluridine-3'-phosphate
  modified_base 10: mod_base = OTHER; note = 5'-methyluridine-3'-phosphate
  modified_base 11: mod_base = OTHER; note = 5'-methyluridine-3'-phosphate
  modified_base 14: mod_base = OTHER; note = 5'-methyluridine-3'-phosphate
  modified_base 18: mod_base = OTHER; note = 5'-methyluridine-3'-phosphate
aggagttggttaatgggtacaaa

SEQ ID NO: 673 - RNA, 23 nt, synthetic construct
  source 1..23: mol_type = other RNA
  modified_base 4: mod_base = OTHER; note = 5'-methyluridine-3'-phosphate
  modified_base 9: mod_base = OTHER; note = 5'-methyluridine-3'-phosphate
  modified_base 10: mod_base = OTHER; note = 5'-methyluridine-3'-phosphate
  modified_base 14: mod_base = OTHER; note = 5'-methyluridine-3'-phosphate
  modified_base 23: mod_base = OTHER; note = 5'-methyluridine
aaatccagttagatgaaaggaat

SEQ ID NO: 674 - RNA, 23 nt, synthetic construct
  source 1..23: mol_type = other RNA
  modified_base 9: mod_base = OTHER; note = 5'-methyluridine-3'-phosphate
  modified_base 12: mod_base = OTHER; note = 5'-methyluridine-3'-phosphate
  modified_base 14: mod_base = OTHER; note = 5'-methyluridine-3'-phosphate
  modified_base 18: mod_base = OTHER; note = 5'-methyluridine-3'-phosphate
  modified_base 21: mod_base = OTHER; note = 5'-methyluridine-3'-phosphate
  modified_base 23: mod_base = OTHER; note = 5'-methyluridine
gaaaggaataatatagatagtgt

SEQ ID NO: 675 - RNA, 23 nt, synthetic construct
  source 1..23: mol_type = other RNA
  modified_base 1: mod_base = OTHER; note = 5'-methyluridine-3'-phosphate
  modified_base 5: mod_base = OTHER; note = 5'-methyluridine-3'-phosphate
  modified_base 8: mod_base = OTHER; note = 5'-methyluridine-3'-phosphate
  modified_base 10: mod_base = OTHER; note = 5'-methyluridine-3'-phosphate
  modified_base 11: mod_base = OTHER; note = 5'-methyluridine-3'-phosphate
  modified_base 15: mod_base = OTHER; note = 5'-methyluridine-3'-phosphate
  modified_base 23: mod_base = OTHER; note = 5'-methyluridine
tagatagtgttcagtagcagaat

SEQ ID NO: 676 - RNA, 23 nt, synthetic construct
  source 1..23: mol_type = other RNA
  modified_base 6: mod_base = OTHER; note = 5'-methyluridine-3'-phosphate
  modified_base 11: mod_base = OTHER; note = 5'-methyluridine-3'-phosphate
  modified_base 17: mod_base = OTHER; note = 5'-methyluridine-3'-phosphate
  modified_base 22: mod_base = OTHER; note = 5'-methyluridine-3'-phosphate
cagaatagaatgaacataaacta

SEQ ID NO: 677 - RNA, 23 nt, synthetic construct
  source 1..23: mol_type = other RNA
  modified_base 5: mod_base = OTHER; note = 5'-methyluridine-3'-phosphate
  modified_base 6: mod_base = OTHER; note = 5'-methyluridine-3'-phosphate
  modified_base 9: mod_base = OTHER; note = 5'-methyluridine-3'-phosphate
  modified_base 10: mod_base = OTHER; note = 5'-methyluridine-3'-phosphate
  modified_base 12: mod_base = OTHER; note = 5'-methyluridine-3'-phosphate
  modified_base 14: mod_base = OTHER; note = 5'-methyluridine-3'-phosphate
  modified_base 15: mod_base = OTHER; note = 5'-methyluridine-3'-phosphate
  modified_base 16: mod_base = OTHER; note = 5'-methyluridine-3'-phosphate
  modified_base 19: mod_base = OTHER; note = 5'-methyluridine-3'-phosphate
  modified_base 22: mod_base = OTHER; note = 5'-methyluridine-3'-phosphate
gaaattccttctatttgatcata

SEQ ID NO: 678 - RNA, 23 nt, synthetic construct
  source 1..23: mol_type = other RNA
  modified_base 1: mod_base = OTHER; note = 5'-methyluridine-3'-phosphate
  modified_base 3: mod_base = OTHER; note = 5'-methyluridine-3'-phosphate
  modified_base 6: mod_base = OTHER; note = 5'-methyluridine-3'-phosphate
  modified_base 12: mod_base = OTHER; note = 5'-methyluridine-3'-phosphate
  modified_base 13: mod_base = OTHER; note = 5'-methyluridine-3'-phosphate
  modified_base 16: mod_base = OTHER; note = 5'-methyluridine-3'-phosphate
  modified_base 20: mod_base = OTHER; note = 5'-methyluridine-3'-phosphate
tatagtccaacttaatacctagc

SEQ ID NO: 679 - RNA, 23 nt, synthetic construct
  source 1..23: mol_type = other RNA
  modified_base 4: mod_base = OTHER; note = 5'-methyluridine-3'-phosphate
  modified_base 9: mod_base = OTHER; note = 5'-methyluridine-3'-phosphate
  modified_base 10: mod_base = OTHER; note = 5'-methyluridine-3'-phosphate
  modified_base 12: mod_base = OTHER; note = 5'-methyluridine-3'-phosphate
  modified_base 16: mod_base = OTHER; note = 5'-methyluridine-3'-phosphate
  modified_base 17: mod_base = OTHER; note = 5'-methyluridine-3'-phosphate
  modified_base 19: mod_base = OTHER; note = 5'-methyluridine-3'-phosphate
  modified_base 21: mod_base = OTHER; note = 5'-methyluridine-3'-phosphate
acctagccttatgagttgtataa

SEQ ID NO: 680 - RNA, 23 nt, synthetic construct
  source 1..23: mol_type = other RNA
  modified_base 1: mod_base = OTHER; note = 5'-methyluridine-3'-phosphate
  modified_base 3: mod_base = OTHER; note = 5'-methyluridine-3'-phosphate
  modified_base 5: mod_base = OTHER; note = 5'-methyluridine-3'-phosphate
  modified_base 10: mod_base = OTHER; note = 5'-methyluridine-3'-phosphate
  modified_base 15: mod_base = OTHER; note = 5'-methyluridine-3'-phosphate
  modified_base 16: mod_base = OTHER; note = 5'-methyluridine-3'-phosphate
  modified_base 20: mod_base = OTHER; note = 5'-methyluridine-3'-phosphate
tgtataaggtaaggttacctacc

SEQ ID NO: 681 - RNA, 23 nt, synthetic construct
  source 1..23: mol_type = other RNA
  modified_base 2: mod_base = OTHER; note = 5'-methyluridine-3'-phosphate
  modified_base 3: mod_base = OTHER; note = 5'-methyluridine-3'-phosphate
  modified_base 7: mod_base = OTHER; note = 5'-methyluridine-3'-phosphate
  modified_base 11: mod_base = OTHER; note = 5'-methyluridine-3'-phosphate
  modified_base 19: mod_base = OTHER; note = 5'-methyluridine-3'-phosphate
  modified_base 22: mod_base = OTHER; note = 5'-methyluridine-3'-phosphate
  modified_base 23: mod_base = OTHER; note = 5'-methyluridine
gttacctacctgagaagctgatt

SEQ ID NO: 682 - RNA, 23 nt, synthetic construct
  source 1..23: mol_type = other RNA
  modified_base 6: mod_base = OTHER; note = 5'-methyluridine-3'-phosphate
  modified_base 9: mod_base = OTHER; note = 5'-methyluridine-3'-phosphate
  modified_base 10: mod_base = OTHER; note = 5'-methyluridine-3'-phosphate
  modified_base 15: mod_base = OTHER; note = 5'-methyluridine-3'-phosphate
  modified_base 16: mod_base = OTHER; note = 5'-methyluridine-3'-phosphate
  modified_base 19: mod_base = OTHER; note = 5'-methyluridine-3'-phosphate
  modified_base 20: mod_base = OTHER; note = 5'-methyluridine-3'-phosphate
  modified_base 22: mod_base = OTHER; note = 5'-methyluridine-3'-phosphate
gaagctgattaacattggttgta

SEQ ID NO: 683 - RNA, 23 nt, synthetic construct
  source 1..23: mol_type = other RNA
  modified_base 3: mod_base = OTHER; note = 5'-methyluridine-3'-phosphate
  modified_base 4: mod_base = OTHER; note = 5'-methyluridine-3'-phosphate
  modified_base 6: mod_base = OTHER; note = 5'-methyluridine-3'-phosphate
  modified_base 11: mod_base = OTHER; note = 5'-methyluridine-3'-phosphate
  modified_base 13: mod_base = OTHER; note = 5'-methyluridine-3'-phosphate
  modified_base 14: mod_base = OTHER; note = 5'-methyluridine-3'-phosphate
  modified_base 16: mod_base = OTHER; note = 5'-methyluridine-3'-phosphate
  modified_base 17: mod_base = OTHER; note = 5'-methyluridine-3'-phosphate
  modified_base 20: mod_base = OTHER; note = 5'-methyluridine-3'-phosphate
  modified_base 21: mod_base = OTHER; note = 5'-methyluridine-3'-phosphate
ggttgtacaatcttattcattag

SEQ ID NO: 684 - RNA, 23 nt, synthetic construct
  source 1..23: mol_type = other RNA
  modified_base 1: mod_base = OTHER; note = 5'-methyluridine-3'-phosphate
  modified_base 4: mod_base = OTHER; note = 5'-methyluridine-3'-phosphate
  modified_base 5: mod_base = OTHER; note = 5'-methyluridine-3'-phosphate
  modified_base 14: mod_base = OTHER; note = 5'-methyluridine-3'-phosphate
  modified_base 17: mod_base = OTHER; note = 5'-methyluridine-3'-phosphate
  modified_base 20: mod_base = OTHER; note = 5'-methyluridine-3'-phosphate
  modified_base 21: mod_base = OTHER; note = 5'-methyluridine-3'-phosphate
tcattagagaacatggtgcttag

SEQ ID NO: 685 - RNA, 23 nt, synthetic construct
  source 1..23: mol_type = other RNA
  modified_base 2: mod_base = OTHER; note = 5'-methyluridine-3'-phosphate
  modified_base 5: mod_base = OTHER; note = 5'-methyluridine-3'-phosphate
  modified_base 8: mod_base = OTHER; note = 5'-methyluridine-3'-phosphate
  modified_base 9: mod_base = OTHER; note = 5'-methyluridine-3'-phosphate
  modified_base 14: mod_base = OTHER; note = 5'-methyluridine-3'-phosphate
  modified_base 16: mod_base = OTHER; note = 5'-methyluridine-3'-phosphate
  modified_base 23: mod_base = OTHER; note = 5'-methyluridine
atggtgcttagggtctgagacct

SEQ ID NO: 686 - RNA, 23 nt, synthetic construct
  source 1..23: mol_type = other RNA
  modified_base 1: mod_base = OTHER; note = 5'-methyluridine-3'-phosphate
  modified_base 3: mod_base = OTHER; note = 5'-methyluridine-3'-phosphate
  modified_base 10: mod_base = OTHER; note = 5'-methyluridine-3'-phosphate
  modified_base 11: mod_base = OTHER; note = 5'-methyluridine-3'-phosphate
  modified_base 12: mod_base = OTHER; note = 5'-methyluridine-3'-phosphate
  modified_base 13: mod_base = OTHER; note = 5'-methyluridine-3'-phosphate
  modified_base 20: mod_base = OTHER; note = 5'-methyluridine-3'-phosphate
  modified_base 22: mod_base = OTHER; note = 5'-methyluridine-3'-phosphate
tctgagaccttttgaaaggtctg

SEQ ID NO: 687 - RNA, 23 nt, synthetic construct
  source 1..23: mol_type = other RNA
  modified_base 1: mod_base = OTHER; note = 5'-methyluridine-3'-phosphate
  modified_base 8: mod_base = OTHER; note = 5'-methyluridine-3'-phosphate
  modified_base 10: mod_base = OTHER; note = 5'-methyluridine-3'-phosphate
  modified_base 17: mod_base = OTHER; note = 5'-methyluridine-3'-phosphate
  modified_base 19: mod_base = OTHER; note = 5'-methyluridine-3'-phosphate
  modified_base 20: mod_base = OTHER; note = 5'-methyluridine-3'-phosphate
  modified_base 21: mod_base = OTHER; note = 5'-methyluridine-3'-phosphate
tgaaaggtctgagaactctttaa

1. A double-stranded ribonucleic acid (dsRNA) for inhibiting expression of complement component 9 (C9) in a cell,
wherein said dsRNA comprises a sense strand and an antisense strand forming a double stranded region,
wherein the antisense strand comprises at least 15 contiguous nucleotides differing by no more than 3 nucleotides from any one of the antisense nucleotide sequences in any one of Tables 2-3.

2.-8. (canceled)

9. The dsRNA agent of claim 1, wherein all of the nucleotides of the sense strand and all of the nucleotides of the antisense strand comprise a nucleotide modification.

10. The dsRNA agent of claim 9, wherein at least one of the modified nucleotides is selected from the group consisting of a deoxy-nucleotide, a 3′-terminal deoxy-thymine (dT) nucleotide, a 2′-O-methyl modified nucleotide, a 2′-fluoro modified nucleotide, a 2′-deoxy-modified nucleotide, a locked nucleotide, an unlocked nucleotide, a conformationally restricted nucleotide, a constrained ethyl nucleotide, an abasic nucleotide, a 2′-amino-modified nucleotide, a 2′-O-allyl-modified nucleotide, 2′-C-alkyl-modified nucleotide, 2′-hydroxly-modified nucleotide, a 2′-methoxyethyl modified nucleotide, a 2′-O-alkyl-modified nucleotide, a morpholino nucleotide, a phosphoramidate, a non-natural base comprising nucleotide, a tetrahydropyran modified nucleotide, a 1,5-anhydrohexitol modified nucleotide, a cyclohexenyl modified nucleotide, a nucleotide comprising a phosphorothioate group, a nucleotide comprising a methylphosphonate group, a nucleotide comprising a 5′-phosphate, a nucleotide comprising a 5′-phosphate mimic, a thermally destabilizing nucleotide, a glycol modified nucleotide (GNA), and a 2-O-(N-methylacetamide) modified nucleotide; and combinations thereof.

11.-15. (canceled)

16. The dsRNA agent of claim 1, wherein the double stranded region is 19-30 nucleotide pairs in length.

17.-20. (canceled)

21. The dsRNA agent of claim 1, wherein each strand is independently no more than 30 nucleotides in length.

22.-25. (canceled)

26. The dsRNA agent of claim 1, wherein at least one strand comprises a 3′ overhang of at least 1 nucleotide.

27. (canceled)

28. The dsRNA agent of claim 1, further comprising a ligand.

29. The dsRNA agent of claim 28, wherein the ligand is conjugated to the 3′ end of the sense strand of the dsRNA agent.

30. The dsRNA agent of claim 28, wherein the ligand is an N-acetylgalactosamine (GalNAc) derivative.

31. The dsRNA agent of claim 28, wherein the ligand is one or more GalNAc derivatives attached through a monovalent, bivalent, or trivalent branched linker.

32. The dsRNA agent of claim 28, wherein the ligand is

[chemical structure]

33. The dsRNA agent of claim 32, wherein the dsRNA agent is conjugated to the ligand as shown in the following schematic [chemical structure]
wherein X is O or S.

34. The dsRNA agent of claim 33, wherein the X is O.

35. The dsRNA agent of claim 1, wherein the dsRNA agent further comprises at least one phosphorothioate or methylphosphonate internucleotide linkage.

36-44. (canceled)

45. A cell containing the dsRNA agent of claim 1.

46. A pharmaceutical composition for inhibiting expression of a gene encoding complement component 9 (C9) comprising the dsRNA agent of claim 1.

47-51. (canceled)

52. A method of inhibiting expression of a complement component 9 (C9) gene in a cell, the method comprising contacting the cell with the dsRNA agent of claim 1, thereby inhibiting expression of the C9 gene in the cell.

53.-58. (canceled)

59. A method of treating a subject having a disorder that would benefit from reduction in complement component C9 (C9) expression, comprising administering to the subject a therapeutically effective amount of the dsRNA agent of claim 1, thereby treating the subject having the disorder that would benefit from reduction in C9 expression.

60. (canceled)

61. The method of claim 59, wherein the disorder is a C9-associated disorder.

62.-65. (canceled)

66. The method of claim 59, wherein the subject is human.

67.-71. (canceled)

72. The method of claim 59, further comprising administering to the subject an additional therapeutic agent.

73. (canceled)

74. (canceled)

75. A kit, a vial, or a syringe comprising the dsRNA agent of claim 1.

76.-78. (canceled)
